United States Patent Application Publication US 2010/0081129 A1 - sequence listing, part 3

SEQ ID NO: 4768 - protein, 550 aa, Homosapiens
MYFCTRGRENQRELEEDSFGLAMDEDGRKFVYFKSLGPYHKSRSSSWSKKRAESSDEENLPRMYETGTEFCPYASFVKYLSKRNPLCKAFFQRPRDHCSEGDVTWYENKAIGKNLLGTRMQMLSKAAKLSKTYTNHCIGAVSIATLNSIAGIGTKLGSPAPQGCYAEALNGAARHHSHHPPTHPSHHHRPQPPSLGNTYILPKDSQVGPDVKSEAAPKRALYESVFGSGEICGPTSPKRLCIRPSEPVDAVVVVSVKHDPLPLLPEANGHRSTNSPTIVSPAIVSPTQDSRPNMSRPLITRSPASPLNNQGIPTPAQLTKSNAPVHIDVGGHMYTSSLATLTKYPESRIGRLFDGTEPIVLDSLKQHYFIDRDGQMFRYILNFLRTSKLLIPDDFKDYTLLYEEAKYFQLQPMLLEMERWKQDRETGRFSRPCECLVVRVAPDLGERITLSGDKSLIEEVFPEIGDVMCNSVNAGWNHDSTHVIRFPLNGYCHLNSVQVLERLQQRGFEIVGSCGGGVDSSQFSEYVLRRELRRTPRVPSVIRIKQEPLD

SEQ ID NO: 4769 - DNA, 2178 bp, Homosapiens
ttcccggggctggctggaccggcgcggacttgccccagacctacggggagcgccccaggtctttaatgacagcttaaatgtggctgttggaaaagtcgaaagggatgtggctgacgtggggcgtgtttcgctcctttgcaagagtcggaaagggagttgggagccgcgcggctggccccaggcccccgcgcctcgccgccagcaagtaggtgggggagccgccgccgccgccagccccatcccgctcccaagcctcgcccgctgcgccctggccgcgggcgccgagagggtgcggggcctcgccgtgcctcctccaccctgctcattaacctgcctgctccgctccgctccgggcggccccagacacgggtttcccgcggcagcacccgcggcccgcccggcgcagccgccgccccgaccccccggctccggggggcaatgagggggcagtggaaggggcactgctcctcgggcattacttagagaaacgagaccgtcccgccctctcgccggccctccctctctcccgcccgggcccgcgcaattctccgccagagggacagtcggcccaatatgtcaagacctctgatcactagatcccctgcatctccactgaacaaccaaggcatccctactccagcacaactcacaaaatccaatgcgcctgtccacattgatgtgggcggccacatgtacaccagcagcctggccaccctcaccaaataccctgaatccagaatcggaagactttttgatggtacagagcccattgttttggacagtctcaaacagcactatttcattgacagagatggacagatgttcagatatatcttgaattttctacgaacatccaaactcctcattcctgatgatttcaaggactacactttgttatatgaagaggcaaaatattttcagcttcagcccatgttgttggagatggaaagatggaagcaggacagagaaactggtcgattttcaaggccctgtgagtgcctcgtcgtgcgtgtggccccagacctcggagaaaggatcacgctaagcggtgacaaatccttgatagaagaagtatttccagagatcggcgacgtgatgtgtaactctgtcaatgcaggctggaatcacgactcgacgcacgtcatcaggtttccactaaatggctactgtcacctcaactcagtccaggtcctcgagaggttgcagcaaagaggatttgaaatcgtgggctcctgtgggggaggagtagactcgtcccagttcagcgaatacgtccttcggcgggaactgaggcggacgccccgtgtaccctccgtcatccggataaagcaagagcctctggactaaatggacatatttcttatgcaaaaaggaaaacacacacaaccaataactcaaacaaaaaagggacatttatgtgcagttgggacagcaaaccaagtcctggacgtaaaatcgaataaaagacacatttatatccaatagagaccacacctgtattcatatgggaacaattggaatagtgatatcctcaaggtgtaaaaaatatataaatatatatatatatgtcaaaaggtaggaaatgcaaaaaagaaaaaaaaaaaaggtgacagccgcagttggtgctgtgatggccgtgaagtgtcctgggccttccgaggcctctgacaaataaacaagccatgagtggtgaggacacagtctccttacagtttccattgccaacaacagccatccatatttcttttttcctttgtctttctttttcctttttttttaaaaaaacaaaacaaacaaaacaccttgaatcaagtttgtttgtatatggaggttccacgtctttctttaggcagggaccaggcaggacttcagaaaaaccctcatgagcacattgcaaagatgttagacatgaaattttaaatgtagtttgtacagaagtcacacttttttgtccacctcacagatgtgaactttactttgttttaaaactgatcagttttgccaaggggccagaattattccttgttagaattgctccagttcaagtctgctgctttcctacaatttttcaaattttataatgtattaaatacaataaactctgtttaaaaaataaggtctgtgtgaaacacacatgtgggggtgaggctggattaaagtgaaattttttctttttga

SEQ ID NO: 4770 - protein, 257 aa, Homosapiens; identical to SEQ ID NO: 729

SEQ ID NO: 4771 - DNA, 1716 bp, Homosapiens
tacagctcccgtcactagctttttctcctcaagcctgcactgcacaccaactgggacggagggtgcagatgaataaaggcaaatccatcaccaaaagacagtcggcccaatatgtcaagacctctgatcactagatcccctgcatctccactgaacaaccaaggcatccctactccagcacaactcacaaaatccaatgcgcctgtccacattgatgtgggcggccacatgtacaccagcagcctggccaccctcaccaaataccctgaatccagaatcggaagactttttgatggtacagagcccattgttttggacagtctcaaacagcactatttcattgacagagatggacagatgttcagatatatcttgaattttctacgaacatccaaactcctcattcctgatgatttcaaggactacactttgttatatgaagaggcaaaatattttcagcttcagcccatgttgttggagatggaaagatggaagcaggacagagaaactggtcgattttcaaggccctgtgagtgcctcgtcgtgcgtgtggccccagacctcggagaaaggatcacgctaagcggtgacaaatccttgatagaagaagtatttccagagatcggcgacgtgatgtgtaactctgtcaatgcaggctggaatcacgactcgacgcacgtcatcaggtttccactaaatggctactgtcacctcaactcagtccaggtcctcgagaggttgcagcaaagaggatttgaaatcgtgggctcctgtgggggaggagtagactcgtcccagttcagcgaatacgtccttcggcgggaactgaggcggacgccccgtgtaccctccgtcatccggataaagcaagagcctctggactaaatggacatatttcttatgcaaaaaggaaaacacacacaaccaataactcaaacaaaaaagggacatttatgtgcagttgggacagcaaaccaagtcctggacgtaaaatcgaataaaagacacatttatatccaatagagaccacacctgtattcatatgggaacaattggaatagtgatatcctcaaggtgtaaaaaatatataaatatatatatatatgtcaaaaggtaggaaatgcaaaaaagaaaaaaaaaaaaggtgacagccgcagttggtgctgtgatggccgtgaagtgtcctgggccttccgaggcctctgacaaataaacaagccatgagtggtgaggacacagtctccttacagtttccattgccaacaacagccatccatatttcttttttcctttgtctttctttttcctttttttttaaaaaaacaaaacaaacaaaacaccttgaatcaagtttgtttgtatatggaggttccacgtctttctttaggcagggaccaggcaggacttcagaaaaaccctcatgagcacattgcaaagatgttagacatgaaattttaaatgtagtttgtacagaagtcacacttttttgtccacctcacagatgtgaactttactttgttttaaaactgatcagttttgccaaggggccagaattattccttgttagaattgctccagttcaagtctgctgctttcctacaatttttcaaattttataatgtattaaatacaataaactctgtttaaaaaataaggtctgtgtgaaacacacatgtgggggtgaggctggattaaagtgaaattttttctttttga

SEQ ID NO: 4772 - protein, 257 aa, Homosapiens; identical to SEQ ID NO: 729

SEQ ID NO: 4773 - DNA, 1296 bp, Homosapiens
tgcttgttaacattgttcctgagttgctgcctccccctcattctcttttgtcttcccattcagtggcttatgactacactttgttatatgaagaggcaaaatattttcagcttcagcccatgttgttggagatggaaagatggaagcaggacagagaaactggtcgattttcaaggccctgtgagtgcctcgtcgtgcgtgtggccccagacctcggagaaaggatcacgctaagcggtgacaaatccttgatagaagaagtatttccagagatcggcgacgtgatgtgtaactctgtcaatgcaggctggaatcacgactcgacgcacgtcatcaggtttccactaaatggctactgtcacctcaactcagtccaggtcctcgagaggttgcagcaaagaggatttgaaatcgtgggctcctgtgggggaggagtagactcgtcccagttcagcgaatacgtccttcggcgggaactgaggcggacgccccgtgtaccctccgtcatccggataaagcaagagcctctggactaaatggacatatttcttatgcaaaaaggaaaacacacacaaccaataactcaaacaaaaaagggacatttatgtgcagttgggacagcaaaccaagtcctggacgtaaaatcgaataaaagacacatttatatccaatagagaccacacctgtattcatatgggaacaattggaatagtgatatcctcaaggtgtaaaaaatatataaatatatatatatatgtcaaaaggtaggaaatgcaaaaaagaaaaaaaaaaaaggtgacagccgcagttggtgctgtgatggccgtgaagtgtcctgggccttccgaggcctctgacaaataaacaagccatgagtggtgaggacacagtctccttacagtttccattgccaacaacagccatccatatttcttttttcctttgtctttctttttcctttttttttaaaaaaacaaaacaaacaaaacaccttgaatcaagtttgtttgtatatggaggttccacgtctttctttaggcagggaccaggcaggacttcagaaaaaccctcatgagcacattgcaaagatgttagacatgaaattttaaatgtagtttgtacagaagtcacacttttttgtccacctcacagatgtgaactttactttgttttaaaactgatcagttttgccaaggggccagaattattccttgttagaattgctccagttcaagtctgctgctttcctacaatttttcaaattttataatgtattaaatacaataaactctgttt

SEQ ID NO: 4774 - protein, 138 aa, Homosapiens; identical to SEQ ID NO: 4766

SEQ ID NO: 4775 - DNA, 2482 bp, Homosapiens
tacacctccagcgtcttcagcaccaacacgcccttcgggctgctcaacaaggtctggttcgagacgtgcatgtacttctgtacccgcggccgcgagaaccagcgtgagttggaggaggactcttttgggctggccatggacgaggacggtcgcaagttcgtctacttcaagtccctcgggccctaccacaagtcgcgctcgtcgtcgtggagcaagaagcgcgccgagagcagcgacgaggagaacttgccccgcatgtatgagacgggcaccgagttctgcccctacgccagcttcgtcaagtacctgtcgaaacgcaaccctctctgcaaggcgttcttccagcggccccgggaccactgcagcgagggcgatgtgacctggtacgagaacaaagccatcggcaagaacttgctaggcactcggatgcagatgctctccaaggcggccaagctctccaagacctacaccaaccactgcatcggcgccgtctccatcgccacgctcaacagcatcgcgggcattggcaccaagctgggctcgcccgccccgcagggctgctacgccgaggctctgaacggggcggcacggcaccactcccaccacccccccacccatccctcccaccaccaccgcccccagccgccctcgctggggaacacttacatcctccccaaagacagccaggtcgggcccgacgtgaaatccgaggctgcgcccaagcgcgccctgtacgagtctgtgttcgggtcgggggaaatctgcggccccacttcccccaaaagactttgtatccgcccctcggagcctgtggatgcggtggtggtggtttccgtgaaacacgaccccctgcctcttcttccagaagccaatgggcacagaagcaccaattctcccacaatagtttcacctgctattgtttcccccacccaggacagtcggcccaatatgtcaagacctctgatcactagatcccctgcatctccactgaacaaccaaggcatccctactccagcacaactcacaaaatccaatgcgcctgtccacattgatgtgggcggccacatgtacaccagcagcctggccaccctcaccaaataccctgaatccagaatcggaagactttttgatggtacagagcccattgttttggacagtctcaaacagcactatttcattgacagagatggacagatgttcagatatatcttgaattttctacgaacatccaaactcctcattcctgatgatttcaaggactacactttgttatatgaagaggcaaaatattttcagcttcagcccatgttgttggagatggaaagatggaagcaggacagagaaactggtcgattttcaaggccctgtgagtgcctcgtcgtgcgtgtggccccagacctcggagaaaggatcacgctaagcggtgacaaatccttgatagaagaagtatttccagagatcggcgacgtgatgtgtaactctgtcaatgcaggctggaatcacgactcgacgcacgtcatcaggtttccactaaatggctactgtcacctcaactcagtccaggtcctcgagaggttgcagcaaagaggatttgaaatcgtgggctcctgtgggggaggagtagactcgtcccagttcagcgaatacgtccttcggcgggaactgaggcggacgccccgtgtaccctccgtcatccggataaagcaagagcctctggactaaatggacatatttcttatgcaaaaaggaaaacacacacaaccaataactcaaacaaaaaagggacatttatgtgcagttgggacagcaaaccaagtcctggacgtaaaatcgaataaaagacacatttatatccaatagagaccacacctgtattcatatgggaacaattggaatagtgatatcctcaaggtgtaaaaaatatataaatatatatatatatgtcaaaaggtaggaaatgcaaaaaagaaaaaaaaaaaaggtgacagccgcagttggtgctgtgatggccgtgaagtgtcctgggccttccgaggcctctgacaaataaacaagccatgagtggtgaggacacagtctccttacagtttccattgccaacaacagccatccatatttcttttttcctttgtctttctttttcctttttttttaaaaaaacaaaacaaacaaaacaccttgaatcaagtttgtttgtatatggaggttccacgtctttctttaggcagggaccaggcaggacttcagaaaaaccctcatgagcacattgcaaagatgttagacatgaaattttaaatgtagtttgtacagaagtcacacttttttgtccacctcacagatgtgaactttactttgttttaaaactgatcagttttgccaaggggccagaattattccttgttagaattgctccagttcaagtctgctgctttcctacaatttttcaaattttataatgtattaaatacaataaactctgttt

SEQ ID NO: 4776 - protein, 550 aa, Homosapiens; identical to SEQ ID NO: 4768

SEQ ID NO: 4777 - DNA, 2107 bp, Homosapiens
ttcccggggctggctggaccggcgcggacttgccccagacctacggggagcgccccaggtctttaatgacagcttaaatgtggctgttggaaaagtcgaaagggatgtggctgacgtggggcgtgtttcgctcctttgcaagagtcggaaagggagttgggagccgcgcggctggccccaggcccccgcgcctcgccgccagcaagtaggtgggggagccgccgccgccgccagccccatcccgctcccaagcctcgcccgctgcgccctggccgcgggcgccgagagggtgcggggcctcgccgtgcctcctccaccctgctcattaacctgcctgctccgctccgctccgggcggccccagacacgggtttcccgcggcagcacccgcggcccgcccggcgcagccgccgccccgaccccccggctccggggggcaatgagggggcagtggaaggggcactgctcctcgggcattacttagagaaacgagaccgtcccgccctctcgccggccctccctctctcccgcccgggcccgcgcaattctccgccagagggacagtcggcccaatatgtcaagacctctgatcactagatcccctgcatctccactgaacaaccaaggcatccctactccagcacaactcacaaaatccaatgcgcctgtccacattgatgtgggcggccacatgtacaccagcagcctggccaccctcaccaaataccctgaatccagaatcggaagactttttgatggtacagagcccattgttttggacagtctcaaacagcactatttcattgacagagatggacagatgttcagatatatcttgaattttctacgaacatccaaactcctcattcctgatgatttcaaggactacactttgttatatgaagaggcaaaatattttcagcttcagcccatgttgttggagatggaaagatggaagcaggacagagaaactggtcgattttcaaggccctgtgagtgcctcgtcgtgcgtgtggccccagacctcggagaaaggatcacgctaagcggtgacaaatccttgatagaagaagtatttccagagatcggcgacgtgatgtgtaactctgtcaatgcaggctggaatcacgactcgacgcacgtcatcaggtttccactaaatggctactgtcacctcaactcagtccaggtcctcgagaggttgcagcaaagaggatttgaaatcgtgggctcctgtgggggaggagtagactcgtcccagttcagcgaatacgtccttcggcgggaactgaggcggacgccccgtgtaccctccgtcatccggataaagcaagagcctctggactaaatggacatatttcttatgcaaaaaggaaaacacacacaaccaataactcaaacaaaaaagggacatttatgtgcagttgggacagcaaaccaagtcctggacgtaaaatcgaataaaagacacatttatatccaatagagaccacacctgtattcatatgggaacaattggaatagtgatatcctcaaggtgtaaaaaatatataaatatatatatatatgtcaaaaggtaggaaatgcaaaaaagaaaaaaaaaaaaggtgacagccgcagttggtgctgtgatggccgtgaagtgtcctgggccttccgaggcctctgacaaataaacaagccatgagtggtgaggacacagtctccttacagtttccattgccaacaacagccatccatatttcttttttcctttgtctttctttttcctttttttttaaaaaaacaaaacaaacaaaacaccttgaatcaagtttgtttgtatatggaggttccacgtctttctttaggcagggaccaggcaggacttcagaaaaaccctcatgagcacattgcaaagatgttagacatgaaattttaaatgtagtttgtacagaagtcacacttttttgtccacctcacagatgtgaactttactttgttttaaaactgatcagttttgccaaggggccagaattattccttgttagaattgctccagttcaagtctgctgctttcctacaatttttcaaattttataatgtattaaatacaataaactctgttt

SEQ ID NO: 4778 - protein, 257 aa, Homosapiens; identical to SEQ ID NO: 729

SEQ ID NO: 4779 - DNA, 669 bp, Homosapiens
tgcttgttaacattgttcctgagttgctgcctccccctcattctcttttgtcttcccattcagtggcttatgactacactttgttatatgaagaggcaaaatattttcagcttcagcccatgttgttggagatggaaagatggaagcaggacagagaaactggtcgattttcaaggccctgtgagtgcctcgtcgtgcgtgtggccccagacctcggagaaaggatcacgctaagcggtgacaaatccttgatagaagaagtatttccagagatcggcgacgtgatgtgtaactctgtcaatgcaggctggaatcacgactcgacgcacgtcatcaggtttccactaaatggctactgtcacctcaactcagtccaggtcctcgagaggttgcagcaaagaggatttgaaatcgtgggctcctgtgggggaggagtagactcgtcccagttcagcgaatacgtccttcggcgggaactgaggcggacgccccgtgtaccctccgtcatccggataaagcaagagcctctggactaaatggacatatttcttatgcaaaaaggaaaacacacacaaccaataactcaaacaaaaaagggacatttatgtgcagttgggacagcaaaccaagtcctggacgtaaaatcgaataaaagacacatttatatcc

SEQ ID NO: 4780 - protein, 138 aa, Homosapiens; identical to SEQ ID NO: 4766

SEQ ID NO: 4781 - DNA, 1480 bp, Homosapiens
ttcccggggctggctggaccggcgcggacttgccccagacctacggggagcgccccaggtctttaatgacagcttaaatgtggctgttggaaaagtcgaaagggatgtggctgacgtggggcgtgtttcgctcctttgcaagagtcggaaagggagttgggagccgcgcggctggccccaggcccccgcgcctcgccgccagcaagtaggtgggggagccgccgccgccgccagccccatcccgctcccaagcctcgcccgctgcgccctggccgcgggcgccgagagggtgcggggcctcgccgtgcctcctccaccctgctcattaacctgcctgctccgctccgctccgggcggccccagacacgggtttcccgcggcagcacccgcggcccgcccggcgcagccgccgccccgaccccccggctccggggggcaatgagggggcagtggaaggggcactgctcctcgggcattacttagagaaacgagaccgtcccgccctctcgccggccctccctctctcccgcccgggcccgcgcaattctccgccagagggacagtcggcccaatatgtcaagacctctgatcactagatcccctgcatctccactgaacaaccaaggcatccctactccagcacaactcacaaaatccaatgcgcctgtccacattgatgtgggcggccacatgtacaccagcagcctggccaccctcaccaaataccctgaatccagaatcggaagactttttgatggtacagagcccattgttttggacagtctcaaacagcactatttcattgacagagatggacagatgttcagatatatcttgaattttctacgaacatccaaactcctcattcctgatgatttcaaggactacactttgttatatgaagaggcaaaatattttcagcttcagcccatgttgttggagatggaaagatggaagcaggacagagaaactggtcgattttcaaggccctgtgagtgcctcgtcgtgcgtgtggccccagacctcggagaaaggatcacgctaagcggtgacaaatccttgatagaagaagtatttccagagatcggcgacgtgatgtgtaactctgtcaatgcaggctggaatcacgactcgacgcacgtcatcaggtttccactaaatggctactgtcacctcaactcagtccaggtcctcgagaggttgcagcaaagaggatttgaaatcgtgggctcctgtgggggaggagtagactcgtcccagttcagcgaatacgtccttcggcgggaactgaggcggacgccccgtgtaccctccgtcatccggataaagcaagagcctctggactaaatggacatatttcttatgcaaaaaggaaaacacacacaaccaataactcaaacaaaaaagggacatttatgtgcagttgggacagcaaaccaagtcctggacgtaaaatcgaataaaagacacatttatatcc

SEQ ID NO: 4782 - protein, 257 aa, Homosapiens; identical to SEQ ID NO: 729

SEQ ID NO: 4783 - DNA, 4579 bp, Homosapiens
aggtgaaagacagtgaataaaagaattcatttgacaaagcctaggactattttgaatggtctcgtcctgagatatttatcaagcggggaccaacactttgcagacaatcgtaatttttccctactgccatcttcaaaagtgctacctttgacagtgataaaagacacctcttagtcctagtgcccgaacaattgatctaattgtcttcactgttccctcttttctatcacagaatcggaagactttttgatggtacagagcccattgttttggacagtctcaaacagcactatttcattgacagagatggacagatgttcagatatatcttgaattttctacgaacatccaaactcctcattcctgatgatttcaaggactacactttgttatatgaagaggcaaaatattttcagcttcagcccatgttgttggagatggaaagatggaagcaggacagagaaactggtcgattttcaaggccctgtgagtgcctcgtcgtgcgtgtggccccagacctcggagaaaggatcacgctaagcggtgacaaatccttgatagaagaagtatttccagagatcggcgacgtgatgtgtaactctgtcaatgcaggctggaatcacgactcgacgcacgtcatcaggtttccactaaatggctactgtcacctcaactcagtccaggtatagcattgttacgcactgtgtggcatcaaatgccactcttactgttgtcacttaaccttgccctcacatggtgcctttcctccaaagagcttagaaactcactcagtgacacttctgttgggtaggtgaattatcaccctctatagcagtcattccgtaagtcttgtgattgtgccaggtgctgggatgagcactggagatacagaagagacagatatagaacacgacagctgggcacggtggcacacgcctatagtcccagccactccagaggctaaggcaggaggatcacttgagcccaggagttcaggttcagcctgggcaacatagtgagacagacagacacagaacacgatggacagctctgtgttcatggaactgcattatgggagtggagtgggaggcaaacagtcaacataaatatattgcccaggaggtggtaagtggatttctggggcagagtatgctggcatattgaggactatcaggaaagccagtttggcttgaagaaagtgactcagggagagagagtacccagacaggaggcccgggaaaatcagggacagatcacggagagcctcgttaggaggtggcaagtgccctaggattgtttattttggcatcttttggttttggttcgtttgtgtatgtgagccaaatggaaatccattggagggttttgagcagaagggagaactgacagaactcgtattttaaagtgaacattgcgacagcagctagagaataggagaaacaaggagaccaggcagcaagctgtggttcaagcagctgaaaagtgtccagttgtgtgtgtctggagggtagagctaataaggttttctgacgatggctgtgggttgtgagacataagcccgggatgactaagatttttgacagaggaactgggtgagtggaactgccatttcctgagatggagaagtgtaggggagcaagagatgtgggggtggaattgagaactcagaggctaatgtgtgctgagcaccgactctctgccctaccctgggccatggcctgagcatgtgttgtcttcttacaaccctaacaggtaagcactgttaatcctctctgtcttgctgatgggaaggcagaggcacacctgggtctcgattccagctccgtgtgacacaaaaccatttgaagtcaatggagtgagggttctagttttttccctctttttaactggaatgggcccatgactttgttcagtatttagtcagcagaacccttcccaaagcacagagactagaagcacccactcttctgtgctgcctcttgaggattgttccactactatttataactctttaaaatatatgaacagatgtctgagaacagaagagcagaaaactggcagaaaatgttccctaagcatgctagcggaaggcacatgctcccaggcggcgggctggctgctgggtcgcagggttcccgaggacgagattcgcgttctcacctgtgcggagagcgtcccctggaggtgtgtggtgctcccgcatggccctgcacagcgttcctgagacggcctcagcagtttaagcctctttaaagcccagaaagcctgtccccttccacacaacagcctgccctggctatcactggagcagacagaggggcagaaccattcagagccaggacaggaaggcctcggccacacctttgggccagtgaataacgatcatcaattcatgtgcttgacagtttcccacatcagatatggaaattttcatctggattaacgtggtcatatgacacagccatgacctacccttgcgtcctgctccaccgaccaagaaataggcaccagcctatgggcacgcagagactctgggataaggcttacgacacccgatacctcactaagttgttgtgtgatcactgtttaaggaactttgctgtgaacgtgttgttgtttccaaagtaatggctccatcagctgtttgcattacattgaaataagcttttgaccacatccaaggtaacattggatcacattgaataattatcacatgatgcctatcggactccgaagaagagcttagcgatttcctcctgttagcatttagtgaccttaagactcaaagaaaaatggacatcagggttaggttctctgctgttcatggcttcctcccctttggatttcctctcctaatcatggcaagggatcttttccagggtgctggtttggccaagcaagctgggatgcctcttgctgagggctgcattcctgcctctgctggggaatccatggagggagctgttcttcgtctttgtatttacctgccaccaaagcacatcttgattttgaatttagggattgttttcttcctgtccttatgctgacaggtatgcatatgcattgtgaatttacctacagaaatagagcactgctgggtagaatgttaattttgttcttataaggacttgtgtatgtttttttaatttgccagcacttgaggttttaattaatttttagaaaacatactctcttgctttcccatctcatctagtaagctgttttgcaacatagcagactatattctatattgaagtaggcaactaaaaaataatactttttaaaaaagtaaggattcactttacattgactacatttcagttcattccaataaaagtttttttgaggtgggtttttttgttttgttttttttttttaagttatgattgaatcactttgcctttaaggtggtgtggaagtaatttaattatattcagaactcgggcaggaaacatttgcaagtctaatatttgttggattcctaaagaaacagaatgctccagatcagtttcctgtatttttgtctatctaatctaagagtcacaggtactgtttcctgcatttaacagtgtcagacatgtagtgccaaacccaggaatcttgctggcgttaggtttttgatttcaaaattaaggaacagattctatggcttacatttgtataagaagtttagaatatctttatttttcttacattttctaatatgtaatcattgtgctggttcttgtctccttgaatgaatgcagggcaataaatctgtttcagatgttacaaacttgaaaacctgtagataatcctctagtgtcttcagtaatccctttgttctgctattgaaattacatcaatcttccaggccaaaacatatatattaactcggtattaggaaaacttgaacaaaggcggagttgagagtacaaatgaatcactgactaagtaaactctgccatcactgtcctttccagattctttatcatctcataggatgtattttagtgataaatgagctttgaaatgtgaaccctcatttttgacagagagggcagcattgcatatacaaaaacaggagatttgaggccaaacagacctgagttggaaacccagtcccatcactgactagccatgaacctcagttttctcatttataaaatgggcctaacaccatcgagtgttgtagctggtgtgtgtaaagcaagcatgaaaggcacattttaggcattagaaatgcttgcttcctctctcctgcccattaatccagggtcttcctttgagaggagcagctcacagggacatgggtgctggatgagatgaaccagagtgcgcataatctcaaactttggggtgtttatgtagccataggacttacctcacccctaactggatgcttgtcttgttccctcgcaggtcctcgagaggttgcagcaaagaggatttgaaatcgtgggctcctgtgggggaggagtagactcgtcccagttcagcgaatacgtccttcggcgggaactgaggcggacgccccgtgtaccctccgtcatccggataaagcaagagcctctggactaaatggacatatttcttatgc

SEQ ID NO: 4784 - protein, 124 aa, Homosapiens
MFRYILNFLRTSKLLIPDDFKDYTLLYEEAKYFQLQPMLLEMERWKQDRETGRFSRPCECLVVRVAPDLGERITLSGDKSLIEEVFPEIGDVMCNSVNAGWNHDSTHVIRFPLNGYCHLNSVQV

SEQ ID NO: 4785 - DNA, 21 bp, Homo sapiens
caaatttgggsgagtgtcctt

SEQ ID NO: 4786 - DNA, 21 bp, Homo sapiens
caatgtaaggrgttctgctga

SEQ ID NO: 4787 - DNA, 21 bp, Homo sapiens
gcctctcagtygtacatccgc

SEQ ID NO: 4788 - DNA, 21 bp, Homo sapiens
ctaactgtggrccaatgcttc

SEQ ID NO: 4789 - DNA, 21 bp, Homo sapiens
ttctcatcttsccagggacac

SEQ ID NO: 4790 - DNA, 21 bp, Homo sapiens
atcgcttacaytgcctggagc

SEQ ID NO: 4791 - DNA, 21 bp, Homo sapiens
gacagaacacwtgtacatgca

SEQ ID NO: 4792 - DNA, 21 bp, Homo sapiens
ggaccctggcyctggggtctt

SEQ ID NO: 4793 - DNA, 21 bp, Homo sapiens
tcaaaccctcrattcctcctc

SEQ ID NO: 4794 - DNA, 21 bp, Homo sapiens
actccatcacscaactaaaaa

SEQ ID NO: 4795 - DNA, 21 bp, Homo sapiens
agtaatgctgygtaacaaagc

SEQ ID NO: 4796 - DNA, 21 bp, Homo sapiens
ccttctgctakggggctcaca

SEQ ID NO: 4797 - DNA, 21 bp, Homo sapiens
ttgtgaagccrggcttgaggt

SEQ ID NO: 4798 - DNA, 21 bp, Homo sapiens
tttctgtatcsatctcttact

SEQ ID NO: 4799 - DNA, 21 bp, Homo sapiens
ggatgcagacwcggtgtgatc

SEQ ID NO: 4800 - DNA, 21 bp, Homo sapiens
gaacatcttcrtaccagaccc

SEQ ID NO: 4801 - DNA, 21 bp, Homo sapiens
tctctaagcayctgtcaagcc

SEQ ID NO: 4802 - DNA, 21 bp, Homo sapiens
catgttccagragctcttgga

SEQ ID NO: 4803 - DNA, 21 bp, Homo sapiens
ttcttctttgratttatttgt

SEQ ID NO: 4804 - DNA, 21 bp, Homo sapiens
tggttcttagygttggtctga

SEQ ID NO: 4805 - DNA, 21 bp, Homo sapiens
agtaaccccasctagcccacc

SEQ ID NO: 4806 - DNA, 21 bp, Homo sapiens
ccactgatgarccagataaca

SEQ ID NO: 4807 - DNA, 21 bp, Homo sapiens
cttcccaatgyctccaatgtt

SEQ ID NO: 4808 - DNA, 21 bp, Homo sapiens
gactagaaccygggtctctct

SEQ ID NO: 4809 - DNA, 21 bp, Homo sapiens
ggccctgaacmaatgggctac

SEQ ID NO: 4810 - DNA, 21 bp, Homo sapiens
cgtcccaggcyaggtctcagc

SEQ ID NO: 4811 - DNA, 21 bp, Homo sapiens
aaggcttcccrggcaggtctc

SEQ ID NO: 4812 - DNA, 21 bp, Homo sapiens
ttactgagtgygacatgtacc

SEQ ID NO: 4813 - DNA, 21 bp, Homo sapiens
agatacttgamaaaagaaaac

SEQ ID NO: 4814 - DNA, 21 bp, Homo sapiens
tcatgcctgtragtggggaaa

SEQ ID NO: 4815 - DNA, 21 bp, Homo sapiens
tggggagctcygttgcctaga

SEQ ID NO: 4816 - DNA, 21 bp, Homo sapiens
aagcatgagcragtccaactc

SEQ ID NO: 4817 - DNA, 21 bp, Homo sapiens
gatgggatgayggttgtgggg

SEQ ID NO: 4818 - DNA, 21 bp, Homo sapiens
gagaacaaacratttcaataa

SEQ ID NO: 4819 - DNA, 21 bp, Homo sapiens
ttctcccctaygtgtgccagg

SEQ ID NO: 4820 - DNA, 21 bp, Homo sapiens
gcgacaggtgytgcccctgcc

SEQ ID NO: 4821 - DNA, 21 bp, Homo sapiens
ttaagcctcarggtaattagg

SEQ ID NO: 4822 - DNA, 21 bp, Homo sapiens
aatgaatgaaygaatgaagct

SEQ ID NO: 4823 - DNA, 21 bp, Homo sapiens
ctttgtgggcmcaccatggtc

SEQ ID NO: 4824 - DNA, 21 bp, Homo sapiens
cccagtggccyttccagctgt

SEQ ID NO: 4825 - DNA, 21 bp, Homo sapiens
gcatcacttcrccctgtcaac

SEQ ID NO: 4826 - DNA, 21 bp, Homo sapiens
aaacgcaccgkctcagggtgg

SEQ ID NO: 4827 - DNA, 21 bp, Homo sapiens
cttccttcccytgggttaaga

SEQ ID NO: 4828 - DNA, 21 bp, Homo sapiens
gacacatgatmatagtagcta

SEQ ID NO: 4829 - DNA, 21 bp, Homo sapiens
acttctgctgygcttacacat

SEQ ID NO: 4830 - DNA, 21 bp, Homo sapiens
taagcaatccrggcagcctcc

SEQ ID NO: 4831 - DNA, 21 bp, Homo sapiens
atccatctttkttcctgtaaa

SEQ ID NO: 4832 - DNA, 21 bp, Homo sapiens
aaggcaagaarccttttctgg

SEQ ID NO: 4833 - DNA, 21 bp, Homo sapiens
ccaggtcgccygattgcagcc

SEQ ID NO: 4834 - DNA, 21 bp, Homo sapiens
gtacctggcayacagcaggtg

SEQ ID NO: 4835 - DNA, 21 bp, Homo sapiens
ggccccacccrcctacaccaa

SEQ ID NO: 4836 - DNA, 21 bp, Homo sapiens
ttcaaccactkactcaaagaa

SEQ ID NO: 4837 - DNA, 21 bp, Homo sapiens
agcagccattytgaaatatgc

SEQ ID NO: 4838 - DNA, 21 bp, Homo sapiens
aaaccagattraaaggttgac

SEQ ID NO: 4839 - DNA, 21 bp, Homo sapiens
gatcacccccmaggcaagtga

SEQ ID NO: 4840 - DNA, 21 bp, Homo sapiens
gcatttatccyctagggttga

SEQ ID NO: 4841 - DNA, 21 bp, Homo sapiens
tgaatcatccrgaaactatcc

SEQ ID NO: 4842 - DNA, 21 bp, Homo sapiens
ccaagggagtygggccctggc

SEQ ID NO: 4843 - DNA, 21 bp, Homo sapiens
ctctatgaackcctgctgcct

SEQ ID NO: 4844 - DNA, 21 bp, Homo sapiens
acagcaatacrcagtattttt

SEQ ID NO: 4845 - DNA, 21 bp, Homo sapiens
aggtgacacaytggcaatgac

SEQ ID NO: 4846 - DNA, 21 bp, Homo sapiens
cccacaggtcrgtctgagtta

SEQ ID NO: 4847 - DNA, 21 bp, Homo sapiens
gtgctgtcaaycagctgcagc

SEQ ID NO: 4848 - DNA, 21 bp, Homo sapiens
gacgcgagcasgcggaacact

SEQ ID NO: 4849 - DNA, 21 bp, Homo sapiens
tgaccttttaytctccctcaa

SEQ ID NO: 4850 - DNA, 21 bp, Homo sapiens
ctcctgtggcrggagatgtca

SEQ ID NO: 4851 - DNA, 21 bp, Homo sapiens
ggagaagtctyttccatcccc

SEQ ID NO: 4852 - DNA, 21 bp, Homo sapiens
atgcaaaaacrtccacaaggg

SEQ ID NO: 4853 - DNA, 21 bp, Homo sapiens
tgcccttcaaygcagtcccac

SEQ ID NO: 4854 - DNA, 21 bp, Homo sapiens
atgcgggatayggttaacatc

SEQ ID NO: 4855 - DNA, 21 bp, Homo sapiens
agcaatgactrtcgtttatag

SEQ ID NO: 4856 - DNA, 21 bp, Homo sapiens
ataatatcatyttctctgcaa

SEQ ID NO: 4857 - DNA, 21 bp, Homo sapiens
tccatactgawcccaatttag

SEQ ID NO: 4858 - DNA, 21 bp, Homo sapiens
aatggcaaatkttaaggtact

SEQ ID NO: 4859 - DNA, 21 bp, Homo sapiens
ctaggatggarggtaggggtg

SEQ ID NO: 4860 - DNA, 21 bp, Homo sapiens
tatgagtccaygggtgcctga

SEQ ID NO: 4861 - DNA, 21 bp, Homo sapiens
ctgcccgaagytgaataggaa

SEQ ID NO: 4862 - DNA, 21 bp, Homo sapiens
catttgcccasatcacccagt

SEQ ID NO: 4863 - DNA, 21 bp, Homo sapiens
ggatggatcargagagcaggc

SEQ ID NO: 4864 - DNA, 21 bp, Homo sapiens
ctgggttacartgccacggtc

SEQ ID NO: 4865 - DNA, 21 bp, Homo sapiens
taacgacaacrggatgcgacc

SEQ ID NO: 4866 - DNA, 21 bp, Homo sapiens
ggtcctcactrgctgggaagg

SEQ ID NO: 4867 - DNA, 21 bp, Homo sapiens
agtctctcagsaagtggagaa

SEQ ID NO: 4868 - DNA, 21 bp, Homo sapiens
gggatgtcagsgaatgatttt

SEQ ID NO: 4869 - DNA, 21 bp, Homo sapiens
ggggaacttcwcaagatctac

SEQ ID NO: 4870 - DNA, 21 bp, Homo sapiens
cttcacctctytgaacctctc

SEQ ID NO: 4871 - DNA, 21 bp, Homo sapiens
acctctcaatrcgatcaaaag

SEQ ID NO: 4872 - DNA, 21 bp, Homo sapiens
ctgtcttacayggacaatgcc

SEQ ID NO: 4873 - DNA, 21 bp, Homo sapiens
gtggtagtgtsgttaggtaca

SEQ ID NO: 4874 - DNA, 21 bp, Homo sapiens
ctgcatcaggrtgactctctg

SEQ ID NO: 4875 - DNA, 21 bp, Homo sapiens
ttgggagtggyccttgacttc

SEQ ID NO: 4876 - DNA, 21 bp, Homo sapiens
gccgcatgggytctgagaacc

SEQ ID NO: 4877 - DNA, 21 bp, Homo sapiens
tatctcagtcrgcttttatgt

SEQ ID NO: 4878 - DNA, 21 bp, Homo sapiens
cagtgaactcstcactgaaac

SEQ ID NO: 4879 - DNA, 21 bp, Homo sapiens
acaacttcccmagcctaatgt

SEQ ID NO: 4880 - DNA, 21 bp, Homo sapiens
ctccccatttycccaccatgg

SEQ ID NO: 4881 - DNA, 21 bp, Homo sapiens
gggaaggggcygttcaaatct

SEQ ID NO: 4882 - DNA, 21 bp, Homo sapiens
cattcctgaaraagaatagca

SEQ ID NO: 4883 - DNA, 21 bp, Homo sapiens
atatagaaaakatttggaaag

SEQ ID NO: 4884 - DNA, 21 bp, Homo sapiens
atactctacaratctaccagg

SEQ ID NO: 4885 - DNA, 21 bp, Homo sapiens
gtcaatggtaycacatccacc

SEQ ID NO: 4886 - DNA, 21 bp, Homo sapiens
ctggggccagrgttctcagtt

SEQ ID NO: 4887 - DNA, 21 bp, Homo sapiens
ttcatggctgrgcccgcaggt

SEQ ID NO: 4888 - DNA, 21 bp, Homo sapiens
gaggcagatcygggtgcccac

SEQ ID NO: 4889 - DNA, 21 bp, Homo sapiens
ttagagtggtwagaactcatt

SEQ ID NO: 4890 - DNA, 21 bp, Homo sapiens
tgtaattgaarttcaagaagg

SEQ ID NO: 4891 - DNA, 21 bp, Homo sapiens
gacttaagaaygagggttatt

SEQ ID NO: 4892 - DNA, 21 bp, Homo sapiens
atctaagtggycttttaaagg

SEQ ID NO: 4893 - DNA, 21 bp, Homo sapiens
tttaacccttygtgacttccc

SEQ ID NO: 4894 - DNA, 21 bp, Homo sapiens
acagcagtgaytccaactctc

SEQ ID NO: 4895 - DNA, 21 bp, Homo sapiens
ggaacaactcmgtccccccca

SEQ ID NO: 4896 - DNA, 21 bp, Homo sapiens
gtcactgggcygagttggagg

SEQ ID NO: 4897 - DNA, 21 bp, Homo sapiens
gatatcaccawctggaagctt

SEQ ID NO: 4898 - DNA, 21 bp, Homo sapiens
atggtactatyatggaatttt

SEQ ID NO: 4899 - DNA, 21 bp, Homo sapiens
catctgtaaamcacccaccct

SEQ ID NO: 4900 - DNA, 21 bp, Homo sapiens
cttggatttgmcacaaaaagc

SEQ ID NO: 4901 - DNA, 21 bp, Homo sapiens
ccccaaatacwcgacgatttt

SEQ ID NO: 4902 - DNA, 21 bp, Homo sapiens
tctctctgggmgttttggtga

SEQ ID NO: 4903 - DNA, 21 bp, Homo sapiens
ctgaacaaaamtgacgggtgc

SEQ ID NO: 4904 - DNA, 21 bp, Homo sapiens
tgtaacctccrtgtccagctg

SEQ ID NO: 4905 - DNA, 21 bp, Homo sapiens
ttctgaccttyattttcggta

SEQ ID NO: 4906 - DNA, 21 bp, Homo sapiens
ccaagccatcrctcgacacag

SEQ ID NO: 4907 - DNA, 21 bp, Homo sapiens
gtcactggcargggaacatgg

SEQ ID NO: 4908 - DNA, 21 bp, Homo sapiens
ggaacagcgcsacatccagtc

SEQ ID NO: 4909 - DNA, 21 bp, Homo sapiens
tctcatttttkgaattctttg

SEQ ID NO: 4910 - DNA, 21 bp, Homo sapiens
acaaggccatrgggaccccta

SEQ ID NO: 4911 - DNA, 21 bp, Homo sapiens
cagctggagcractccactgg

SEQ ID NO: 4912 - DNA, 21 bp, Homo sapiens
aatgtattgtyttcttgaaaa

SEQ ID NO: 4913 - DNA, 21 bp, Homo sapiens
ggaggtggcasagcaggcagc

SEQ ID NO: 4914 - DNA, 21 bp, Homo sapiens
ctccatcacaytgggggctcc

SEQ ID NO: 4915 - DNA, 21 bp, Homo sapiens
tctgctggtcrcgccctgtgc

SEQ ID NO: 4916 - DNA, 21 bp, Homo sapiens
cacctggaacycagtctgtct

SEQ ID NO: 4917 - DNA, 21 bp, Homo sapiens
aaaggcggggkcctgaggctt

SEQ ID NO: 4918 - DNA, 21 bp, Homo sapiens
gagaggcctgsccaacctctg

SEQ ID NO: 4919 - DNA, 21 bp, Homo sapiens
tctgggctaaygggacaaagt

SEQ ID NO: 4920 - DNA, 21 bp, Homo sapiens
gcaacaaactyggacagctgg

SEQ ID NO: 4921 - DNA, 21 bp, Homo sapiens
ggattcccgaytcacagcagc

SEQ ID NO: 4922 - DNA, 21 bp, Homo sapiens
ccacaacgaaygccataaaaa

SEQ ID NO: 4923 - DNA, 21 bp, Homo sapiens
gcttatcccartagcacggca

SEQ ID NO: 4924 - DNA, 21 bp, Homo sapiens
gattcagttcrggattaaaga

SEQ ID NO: 4925 - DNA, 21 bp, Homo sapiens
tagcacgtgcrtaccactaag

SEQ ID NO: 4926 - DNA, 21 bp, Homo sapiens
gttagaacagyctcttccaga

SEQ ID NO: 4927 - DNA, 21 bp, Homo sapiens
gtttgatgtcrtggatgttga

SEQ ID NO: 4928 - DNA, 21 bp, Homo sapiens
ttattctccawctcctccaag

SEQ ID NO: 4929 - DNA, 21 bp, Homo sapiens
gtgctttggaraaggagcttg

SEQ ID NO: 4930 - DNA, 21 bp, Homo sapiens
acttcaattaygataaaagcc

SEQ ID NO: 4931 - DNA, 21 bp, Homo sapiens
gacctagttcrgcgttttagt

SEQ ID NO: 4932 - DNA, 21 bp, Homo sapiens
tccccagcatracgttcaagg

SEQ ID NO: 4933 - DNA, 21 bp, Homo sapiens
gaagaaacaayctccccacaa

SEQ ID NO: 4934 - DNA, 21 bp, Homo sapiens
tgaagctgttrttccaaataa

SEQ ID NO: 4935 - DNA, 21 bp, Homo sapiens
taaaggtcccygacgaagtca

SEQ ID NO: 4936 - DNA, 21 bp, Homo sapiens
atttcccacayctaggaagca

SEQ ID NO: 4937 - DNA, 21 bp, Homo sapiens
ccttagcaaasatgctgatca

SEQ ID NO: 4938 - DNA, 21 bp, Homo sapiens
cctatcccacrgctgatttgc

SEQ ID NO: 4939 - DNA, 21 bp, Homo sapiens
gtggaaacaakgatggtcata

SEQ ID NO: 4940 - DNA, 21 bp, Homo sapiens
atctggccctygcaccctctg

SEQ ID NO: 4941 - DNA, 21 bp, Homo sapiens
ctggactgctrgatgagagag

SEQ ID NO: 4942 - DNA, 21 bp, Homo sapiens
aagaaggcttrggctagaaag

SEQ ID NO: 4943 - DNA, 21 bp, Homo sapiens
aagataaaccyaggctatttt

SEQ ID NO: 4944 - DNA, 21 bp, Homo sapiens
aaggacacagragaaatccca

SEQ ID NO: 4945 - DNA, 21 bp, Homo sapiens
acccaacataycccagagcag

SEQ ID NO: 4946 - DNA, 21 bp, Homo sapiens
taagaaactayaatccagttt

SEQ ID NO: 4947 - DNA, 21 bp, Homo sapiens
gcatcacatcycctcagggaa

SEQ ID NO: 4948 - DNA, 21 bp, Homo sapiens
agggtgctccrggaacccagg

SEQ ID NO: 4949 - DNA, 21 bp, Homo sapiens
acttctgaacraccccacccc

SEQ ID NO: 4950 - DNA, 21 bp, Homo sapiens
acataaagacyagagactcag

SEQ ID NO: 4951 - DNA, 21 bp, Homo sapiens
taagaaaccayatacctattt

SEQ ID NO: 4952 - DNA, 21 bp, Homo sapiens
acagaatttaraaaataattt

SEQ ID NO: 4953 - DNA, 21 bp, Homo sapiens
aaactggaaawcttgaaaaac

SEQ ID NO: 4954 - DNA, 21 bp, Homo sapiens
tataagatcargtcaagattc

SEQ ID NO: 4955 - DNA, 21 bp, Homo sapiens
ttaaaatgcayagtataacca

SEQ ID NO: 4956 - DNA, 21 bp, Homo sapiens
cagtaactgayagcattagac

SEQ ID NO: 4957 - DNA, 21 bp, Homo sapiens
agtccactgartaagagctag

SEQ ID NO: 4958 - DNA, 21 bp, Homo sapiens
gttaatccccscttcctgttc

SEQ ID NO: 4959 - DNA, 21 bp, Homo sapiens
cagtagcttcratatgagtta

SEQ ID NO: 4960 - DNA, 21 bp, Homo sapiens
ttctttagctkcgaggcctca

SEQ ID NO: 4961 - DNA, 21 bp, Homo sapiens
ctctcttgctsgcaatgttat

SEQ ID NO: 4962 - DNA, 21 bp, Homo sapiens
cagtaatcctrctggtattgg

SEQ ID NO: 4963 - DNA, 21 bp, Homo sapiens
actctcactaycttacacacc

SEQ ID NO: 4964 - DNA, 21 bp, Homo sapiens
ggggagagaaratgactagaa

SEQ ID NO: 4965 - DNA, 21 bp, Homo sapiens
ggctaaaagcyatggaatgta

SEQ ID NO: 4966 - DNA, 21 bp, Homo sapiens
ggataatactygtaaaaatca

SEQ ID NO: 4967 - DNA, 21 bp, Homo sapiens
ggctggaaaamagagccaaaa

SEQ ID NO: 4968 - DNA, 21 bp, Homo sapiens
ggaggcaagaygggagaaaaa

SEQ ID NO: 4969 - DNA, 21 bp, Homo sapiens
gctcctctgtmcatctcatca

SEQ ID NO: 4970 - DNA, 21 bp, Homo sapiens
cgttccagggrgttgctactg

SEQ ID NO: 4971 - DNA, 21 bp, Homo sapiens
aagatggtggyacagtcgata

SEQ ID NO: 4972 - DNA, 21 bp, Homo sapiens
caataaactgrttacatttca

SEQ ID NO: 4973 - DNA, 21 bp, Homo sapiens
aaagtctcagyggtcctccta

SEQ ID NO: 4974 - DNA, 21 bp, Homo sapiens
cagaaagcaamgccttttagg

SEQ ID NO: 4975 - DNA, 21 bp, Homo sapiens
actccttcctytccatgctct

SEQ ID NO: 4976 - DNA, 21 bp, Homo sapiens
gatgaaccttraagacaagta

SEQ ID NO: 4977 - DNA, 21 bp, Homo sapiens
ctcttctctaytaaaattaaa

SEQ ID NO: 4978 - DNA, 21 bp, Homo sapiens
taatctctttyattttttcct

SEQ ID NO: 4979 - DNA, 21 bp, Homo sapiens
caaaagagagraaagaaaatt

SEQ ID NO: 4980 - DNA, 21 bp, Homo sapiens
caaaatataarttataatcaa

SEQ ID NO: 4981 - DNA, 21 bp, Homo sapiens
aagctggatgyctacctctta

SEQ ID NO: 4982 - DNA, 21 bp, Homo sapiens
agaaaattctmctcttttgga

SEQ ID NO: 4983 - DNA, 21 bp, Homo sapiens
tatcaatctgytctatattac

SEQ ID NO: 4984 - DNA, 21 bp, Homo sapiens
aaatctagagrccaactaggt

SEQ ID NO: 4985 - DNA, 21 bp, Homo sapiens
atgtatcaaakattagtccct

SEQ ID NO: 4986 - DNA, 21 bp, Homo sapiens
catgttgatcrattcctcctc

SEQ ID NO: 4987 - DNA, 21 bp, Homo sapiens
catggcaaaaytcaaacctag

SEQ ID NO: 4988 - DNA, 21 bp, Homo sapiens
acaggagatgyctgagacttt

SEQ ID NO: 4989 - DNA, 21 bp, Homo sapiens
taacccacaartattattttt

SEQ ID NO: 4990 - DNA, 21 bp, Homo sapiens
cgaaagagtaytgagtctcat

SEQ ID NO: 4991 - DNA, 21 bp, Homo sapiens
ctatttcagtmatctttatga

SEQ ID NO: 4992 - DNA, 21 bp, Homo sapiens
ttttaaaaggycccaactcac

SEQ ID NO: 4993 - DNA, 21 bp, Homo sapiens
agggataggasgtggcagctc

SEQ ID NO: 4994 - DNA, 21 bp, Homo sapiens
tggagctaccytgggtccctg

SEQ ID NO: 4995 - DNA, 21 bp, Homo sapiens
agttttgtctrttttgcccat

SEQ ID NO: 4996 - DNA, 21 bp, Homo sapiens
cagaactctcrgtttgattaa

SEQ ID NO: 4997 - DNA, 21 bp, Homo sapiens
tcctgaagtgrtcaccaggta

SEQ ID NO: 4998 - DNA, 21 bp, Homo sapiens
gccccaaaccsgactccgcta

SEQ ID NO: 4999 - DNA, 21 bp, Homo sapiens
agatgctaaargaaggtttct

SEQ ID NO: 5000 - DNA, 21 bp, Homo sapiens
atacatattcktaggagccaa

SEQ ID NO: 5001 - DNA, 21 bp, Homo sapiens
ttagactttcygctttagaaa

SEQ ID NO: 5002 - DNA, 21 bp, Homo sapiens
ttaggaaaccycatttgaagc

SEQ ID NO: 5003 - DNA, 21 bp, Homo sapiens
ctacctccaaygcaggcacag

SEQ ID NO: 5004 - DNA, 21 bp, Homo sapiens
ttccccaaagrggaaagtgac

SEQ ID NO: 5005 - DNA, 21 bp, Homo sapiens
tggaaactgarcacaagtaca

SEQ ID NO: 5006 - DNA, 21 bp, Homo sapiens
aatggagacasgggaggactc

SEQ ID NO: 5007 - DNA, 21 bp, Homo sapiens
cataagtacaygctacaacgt

SEQ ID NO: 5008 - DNA, 21 bp, Homo sapiens
agtgtaaatarcaataataac

SEQ ID NO: 5009 - DNA, 21 bp, Homo sapiens
gcggcggcttrgcagggagag

SEQ ID NO: 5010 - DNA, 21 bp, Homo sapiens
aggtgaagtgrgtagcagagg

SEQ ID NO: 5011 - DNA, 21 bp, Homo sapiens
tttaccaggtktaggtgactg

SEQ ID NO: 5012 - DNA, 21 bp, Homo sapiens
gcacaaaggargaggtgaatg

SEQ ID NO: 5013 - DNA, 21 bp, Homo sapiens
tgagagtgacrtcactgcaag

SEQ ID NO: 5014 - DNA, 21 bp, Homo sapiens
ttatccttggygactctaatg

SEQ ID NO: 5015 - DNA, 21 bp, Homo sapiens
aaaggacttawctcctcttgg

SEQ ID NO: 5016 - DNA, 21 bp, Homo sapiens
ttaaccatggrcacatatcac

SEQ ID NO: 5017 - DNA, 21 bp, Homo sapiens
tatagtatccrgaagattcta

SEQ ID NO: 5018 - DNA, 21 bp, Homo sapiens
agttgaacctrtgttaaaatg

SEQ ID NO: 5019 - DNA, 21 bp, Homo sapiens
ttcagcagggragtggctgct

SEQ ID NO: 5020 - DNA, 21 bp, Homo sapiens
agactgagggyggctcctcct

SEQ ID NO: 5021 - DNA, 21 bp, Homo sapiens
tactatatttkgaggcataaa

SEQ ID NO: 5022 - DNA, 21 bp, Homo sapiens
caagtttcttwacagatatgt

SEQ ID NO: 5023 - DNA, 21 bp, Homo sapiens
gtccaacccaygacccgcagg

SEQ ID NO: 5024 - DNA, 21 bp, Homo sapiens
tgtttcccatycttgtcctca

SEQ ID NO: 5025 - DNA, 21 bp, Homo sapiens
ataaacacatygctaaagttg

SEQ ID NO: 5026 - DNA, 21 bp, Homo sapiens
atatccttcakggatctagac

SEQ ID NO: 5027 - DNA, 21 bp, Homo sapiens
agacccaaggwtcattgcctc

SEQ ID NO: 5028 - DNA, 21 bp, Homo sapiens
tatccattcayctattaagat

SEQ ID NO: 5029 - DNA, 21 bp, Homo sapiens
tctttcacagsaggacatctg

SEQ ID NO: 5030 - DNA, 21 bp, Homo sapiens
ggtgaacctcrgtttcctcat

SEQ ID NO: 5031 - DNA, 21 bp, Homo sapiens
tgtgccaggcyttgcactaga

SEQ ID NO: 5032 - DNA, 21 bp, Homo sapiens
gaggatctgcrgctactgtta

SEQ ID NO: 5033 - DNA, 21 bp, Homo sapiens
gacggtggtarcgttcttcag

SEQ ID NO: 5034 - DNA, 21 bp, Homo sapiens
gagcaggggtrtaggtctgag

SEQ ID NO: 5035 - DNA, 21 bp, Homo sapiens
gccatgatcarggagtgagga

SEQ ID NO: 5036 - DNA, 21 bp, Homo sapiens
tcagtgtacartcattggttt

SEQ ID NO: 5037 - DNA, 21 bp, Homo sapiens
gcaagtaagcyaaacagacac

SEQ ID NO: 5038 - DNA, 21 bp, Homo sapiens
gtttctttctrtctgtctgtt

SEQ ID NO: 5039 - DNA, 21 bp, Homo sapiens
agttcaggacrcgcccctctc

SEQ ID NO: 5040 - DNA, 21 bp, Homo sapiens
ccctggagccrtgagtgagca

SEQ ID NO: 5041 - DNA, 21 bp, Homo sapiens
tgtccagaccytgttttattt

SEQ ID NO: 5042 - DNA, 21 bp, Homo sapiens
gtgatggaggygatacagccc

SEQ ID NO: 5043 - DNA, 21 bp, Homo sapiens
taccttccacygtggattaac

SEQ ID NO: 5044 - DNA, 21 bp, Homo sapiens
cctgtcatacrtcgcagtcac

SEQ ID NO: 5045 - DNA, 21 bp, Homo sapiens
gtgggacgggmgagtctgcgc

SEQ ID NO: 5046 - DNA, 21 bp, Homo sapiens
gctgtcccctrtccccacgac

SEQ ID NO: 5047 - DNA, 21 bp, Homo sapiens
acgctcatcarcaaagccaga

SEQ ID NO: 5048 - DNA, 21 bp, Homo sapiens
ctgaagcatgkgggggtggac

SEQ ID NO: 5049 - DNA, 21 bp, Homo sapiens
tgcacgttgcrctctgctgtc

SEQ ID NO: 5050 - DNA, 21 bp, Homo sapiens
tctgcgaggaragtttgagca

SEQ ID NO: 5051 - DNA, 21 bp, Homo sapiens
ggttatgaggkgggcagcagc

SEQ ID NO: 5052 - DNA, 21 bp, Homo sapiens
actgcatacaytatgtggcac

SEQ ID NO: 5053 - DNA, 21 bp, Homo sapiens
tgctggccccyggggactgtg

SEQ ID NO: 5054 - DNA, 21 bp, Homo sapiens
tccttttatgrgatctctctg

SEQ ID NO: 5055 - DNA, 21 bp, Homo sapiens
gtaacagcttycccctgacca

SEQ ID NO: 5056 - DNA, 21 bp, Homo sapiens
gtagaagggcrggcaagtttg

SEQ ID NO: 5057 - DNA, 21 bp, Homo sapiens
tgggaatcagyctgggatccc

SEQ ID NO: 5058 - DNA, 21 bp, Homo sapiens
tcatccttccrctccttcaca

SEQ ID NO: 5059 - DNA, 21 bp, Homo sapiens
agtcaagaggytgaatgacat

SEQ ID NO: 5060 - DNA, 21 bp, Homo sapiens
gatcactctcrtagacatggc

SEQ ID NO: 5061 - DNA, 21 bp, Homo sapiens
gagctgcagayggcacacgag

SEQ ID NO: 5062 - DNA, 21 bp, Homo sapiens
gatgaaagggraccccaggac

SEQ ID NO: 5063 - DNA, 21 bp, Homo sapiens
gacgcaaggcrtgagtgcagc

SEQ ID NO: 5064 - DNA, 21 bp, Homo sapiens
cccaactgctrgccctttcaa

SEQ ID NO: 5065 - DNA, 21 bp, Homo sapiens
tgtaccacaawgtaccaagat

SEQ ID NO: 5066 - DNA, 21 bp, Homo sapiens
ctggagctggrtaaggatggt

SEQ ID NO: 5067 - DNA, 21 bp, Homo sapiens
aaaatccatasgggcctttgg

SEQ ID NO: 5068 - DNA, 21 bp, Homo sapiens
tccaggcaggmattacactcc

SEQ ID NO: 5069 - DNA, 21 bp, Homo sapiens
caaggcacccwgattagacac

SEQ ID NO: 5070 - DNA, 21 bp, Homo sapiens
ccacctcctcytcttccatcc

SEQ ID NO: 5071 - DNA, 21 bp, Homo sapiens
accaggaaagygcctgccagt

SEQ ID NO: 5072 - DNA, 21 bp, Homo sapiens
tcatggggaawgagaaatgtg

SEQ ID NO: 5073 - DNA, 21 bp, Homo sapiens
agggcagggaraagaaaaaac

SEQ ID NO: 5074 - DNA, 21 bp, Homo sapiens
ctccaagactrcagggaaaaa

SEQ ID NO: 5075 - DNA, 21 bp, Homo sapiens
gaggaaaaaakaatagaattg

SEQ ID NO: 5076 - DNA, 21 bp, Homo sapiens
cttccccgtgytccacctaag

SEQ ID NO: 5077 - DNA, 21 bp, Homo sapiens
gcaagattggkttttcacaca

SEQ ID NO: 5078 - DNA, 21 bp, Homo sapiens
catgggccacrgctccctggt

SEQ ID NO: 5079 - DNA, 21 bp, Homo sapiens
catcagcatcrgcaaatctcc

SEQ ID NO: 5080 - DNA, 21 bp, Homo sapiens
aggctccagcrgagatgggaa

SEQ ID NO: 5081 - DNA, 21 bp, Homo sapiens
gattccagccrctcctgtcag

SEQ ID NO: 5082 - DNA, 21 bp, Homo sapiens
gcgttagatamaacgtggaga

SEQ ID NO: 5083 - DNA, 21 bp, Homo sapiens
caagtttgacrtgacctcaga

SEQ ID NO: 5084 - DNA, 21 bp, Homo sapiens
cccaaagcaarttagtggcag

SEQ ID NO: 5085 - DNA, 21 bp, Homo sapiens
aacaattattyttctcccaaa

SEQ ID NO: 5086 - DNA, 21 bp, Homo sapiens
taaaaccccaraaatgtgtat

SEQ ID NO: 5087 - DNA, 21 bp, Homo sapiens
agcagcgggtstccactcact

SEQ ID NO: 5088 - DNA, 21 bp, Homo sapiens
gagcatcgcaygtagcgagga

SEQ ID NO: 5089 - DNA, 21 bp, Homo sapiens
cagagactgayagcgtctggc

SEQ ID NO: 5090 - DNA, 21 bp, Homo sapiens
ccaggtacaakggtgaagacc

SEQ ID NO: 5091 - DNA, 21 bp, Homo sapiens
acagaagggaytaactagaaa

SEQ ID NO: 5092 - DNA, 21 bp, Homo sapiens
tcctaggactyccctccctca

SEQ ID NO: 5093 - DNA, 21 bp, Homo sapiens
gcagaagactycctgagactc

SEQ ID NO: 5094 - DNA, 21 bp, Homo sapiens
ctctctttttycttttataaa

SEQ ID NO: 5095 - DNA, 21 bp, Homo sapiens
ttaaaacacasaatcaacagg

SEQ ID NO: 5096 - DNA, 21 bp, Homo sapiens
aagcaaaaagstttaaaggat

SEQ ID NO: 5097 - DNA, 21 bp, Homo sapiens
gcaagattgtytgcattcaaa

SEQ ID NO: 5098 - DNA, 21 bp, Homo sapiens
tgctaagtccrctagcctcga

SEQ ID NO: 5099 - DNA, 21 bp, Homo sapiens
gaagcaacacrtctcttggaa

SEQ ID NO: 5100 - DNA, 21 bp, Homo sapiens
agtataagggygtactcagga

SEQ ID NO: 5101 - DNA, 21 bp, Homo sapiens
ggccgcctggyagatgctgtg

SEQ ID NO: 5102 - DNA, 21 bp, Homo sapiens
aaagtgaatgstgagctgggg

SEQ ID NO: 5103 - DNA, 21 bp, Homo sapiens
tccgtgatccwtcacgccaac

SEQ ID NO: 5104 - DNA, 21 bp, Homo sapiens
tgacgtgactrgggacgctgc

SEQ ID NO: 5105 - DNA, 21 bp, Homo sapiens
aacggaaacarcagataaaag

SEQ ID NO: 5106 - DNA, 21 bp, Homo sapiens
cccctaagtgygctgcctcct

SEQ ID NO: 5107 - DNA, 21 bp, Homo sapiens
taggctgcctsagtgcaagct

SEQ ID NO: 5108 - DNA, 21 bp, Homo sapiens
attagagacaytcacaaaggg

SEQ ID NO: 5109 - DNA, 21 bp, Homo sapiens
gtgaagcaackgacagaaaca

SEQ ID NO: 5110 - DNA, 21 bp, Homo sapiens
atgtctactgygttctgaaca

SEQ ID NO: 5111 - DNA, 21 bp, Homo sapiens
ggtggctgcgsgggtctacag

SEQ ID NO: 5112 - DNA, 21 bp, Homo sapiens
actctgtgcartggctcaggt

SEQ ID NO: 5113 - DNA, 21 bp, Homo sapiens
ccattaaattmtcttccatct

SEQ ID NO: 5114 - DNA, 21 bp, Homo sapiens
ccctgaaaggyaagacagaaa

SEQ ID NO: 5115 - DNA, 21 bp, Homo sapiens
aatcagtcacrtgatgggagg

SEQ ID NO: 5116 - DNA, 21 bp, Homo sapiens
acatctgttgmaatcactaac

SEQ ID NO: 5117 - DNA, 21 bp, Homo sapiens
gtgtgacttcrggccaagcgc

SEQ ID NO: 5118 - DNA, 21 bp, Homo sapiens
agccactgtgsctagacgtac

SEQ ID NO: 5119 - DNA, 21 bp, Homo sapiens
ctggacctccrtggcaactgc

SEQ ID NO: 5120 - DNA, 21 bp, Homo sapiens
gataaactgtscaatcagaac

SEQ ID NO: 5121 - DNA, 21 bp, Homo sapiens
agtgccaggcrgccagtgcaa

SEQ ID NO: 5122 - DNA, 21 bp, Homo sapiens
tcatggaattyattccaaagt

SEQ ID NO: 5123 - DNA, 21 bp, Homo sapiens
gtttttcaaamggtatcatta

SEQ ID NO: 5124 - DNA, 21 bp, Homo sapiens
accaagaaaasgtggtgtcct

SEQ ID NO: 5125 - DNA, 21 bp, Homo sapiens
atagctcctawcataaaaaaa

SEQ ID NO: 5126 - DNA, 21 bp, Homo sapiens
cacataatacrtggatggatt

SEQ ID NO: 5127 - DNA, 21 bp, Homo sapiens
tgggcattackggcatcctga

SEQ ID NO: 5128 - DNA, 21 bp, Homo sapiens
aaaatgtaccrtaaattcaat

SEQ ID NO: 5129 - DNA, 21 bp, Homo sapiens
gcaatcaatgscattatagtc

SEQ ID NO: 5130 - DNA, 21 bp, Homo sapiens
ccccaaacaargaggtgttta

SEQ ID NO: 5131 - DNA, 21 bp, Homo sapiens
atctcatacawttgctgtgag

SEQ ID NO: 5132 - DNA, 21 bp, Homo sapiens
catgtctgacscccatggctc

SEQ ID NO: 5133 - DNA, 21 bp, Homo sapiens
taagtcagctkctttatatgg

SEQ ID NO: 5134 - DNA, 21 bp, Homo sapiens
aactatcagawctcagatttt

SEQ ID NO: 5135 - DNA, 21 bp, Homo sapiens
gagggtgcagmattctgagac

SEQ ID NO: 5136 - DNA, 21 bp, Homo sapiens
ggatatttacrtaagacttac

SEQ ID NO: 5137 - DNA, 21 bp, Homo sapiens
cttatatggawgaacccagtc

SEQ ID NO: 5138 - DNA, 21 bp, Homo sapiens
gagcatttacrtaaataatta

SEQ ID NO: 5139 - DNA, 21 bp, Homo sapiens
tcctctgaacrtggatgaaat

SEQ ID NO: 5140 - DNA, 21 bp, Homo sapiens
catttctgagrtacgtgtgtg

SEQ ID NO: 5141 - DNA, 21 bp, Homo sapiens
gcagagcatamttattggaag

SEQ ID NO: 5142 - DNA, 21 bp, Homo sapiens
cttttaaataycctaggctaa

SEQ ID NO: 5143 - DNA, 21 bp, Homo sapiens
gtcacattcargtcttacctt

SEQ ID NO: 5144 - DNA, 21 bp, Homo sapiens
acactatgggrgcaaggtcta

SEQ ID NO: 5145 - DNA, 21 bp, Homo sapiens
tgagtccttcrgcaatatgta

SEQ ID NO: 5146 - DNA, 21 bp, Homo sapiens
ggaagtggcayatatcactac

SEQ ID NO: 5147 - DNA, 21 bp, Homo sapiens
ttttgtaaatmtctaatggct

SEQ ID NO: 5148 - DNA, 21 bp, Homo sapiens
ctactagtacrggttggtata

SEQ ID NO: 5149 - DNA, 21 bp, Homo sapiens
tttgcttctcrcctacccaca

SEQ ID NO: 5150 - DNA, 21 bp, Homo sapiens
tcatacatatrgtcgcaacat

SEQ ID NO: 5151 - DNA, 21 bp, Homo sapiens
gacccagtttsctacctaacc

SEQ ID NO: 5152 - DNA, 21 bp, Homo sapiens
gatcccctccwgatgccttct

SEQ ID NO: 5153 - DNA, 21 bp, Homo sapiens
atagaaagctragtccatatc

SEQ ID NO: 5154 - DNA, 21 bp, Homo sapiens
tccttcatccwttccttgcct

SEQ ID NO: 5155 - DNA, 21 bp, Homo sapiens
aacataacctrgcttatcctg

SEQ ID NO: 5156 - DNA, 21 bp, Homo sapiens
cagatattgargttccatatt

SEQ ID NO: 5157 - DNA, 21 bp, Homo sapiens
tgagtgcctaycatgtaccag

SEQ ID NO: 5158 - DNA, 21 bp, Homo sapiens
ggtccctcacrggtcttacta

SEQ ID NO: 5159 - DNA, 21 bp, Homo sapiens
ttgtgtcttawaaagattttg

SEQ ID NO: 5160 - DNA, 21 bp, Homo sapiens
tctaaccttartatgtttctc

SEQ ID NO: 5161 - DNA, 21 bp, Homo sapiens
tgcagacttcygtgagatgat

SEQ ID NO: 5162 - DNA, 21 bp, Homo sapiens
agccagacacyatactagccc

SEQ ID NO: 5163 - DNA, 21 bp, Homo sapiens
gagtcttaccyggccagtttc

SEQ ID NO: 5164 - DNA, 21 bp, Homo sapiens
aactcataaakttaaacttct

SEQ ID NO: 5165 - DNA, 21 bp, Homo sapiens
cctagtcttcrtcatctaaag

SEQ ID NO: 5166 - DNA, 21 bp, Homo sapiens
catcagaaatmttaaatgttg

SEQ ID NO: 5167 - DNA, 21 bp, Homo sapiens
gtagtaaacarcaatcaaata

SEQ ID NO: 5168 - DNA, 21 bp, Homo sapiens
tgaaaattatrgaccctcttc

SEQ ID NO: 5169 - DNA, 21 bp, Homo sapiens
tcagaggaagytcgttagtga

SEQ ID NO: 5170 - DNA, 21 bp, Homo sapiens
ctatataaacycagatctata

SEQ ID NO: 5171 - DNA, 21 bp, Homo sapiens
taagttaaagrtagctgccat

SEQ ID NO: 5172 - DNA, 21 bp, Homo sapiens
atttaaattcmttgtgccata

SEQ ID NO: 5173 - DNA, 21 bp, Homo sapiens
gttatatagtyggaatcacac

SEQ ID NO: 5174 - DNA, 21 bp, Homo sapiens
gagagatactrtaaaaatgac

SEQ ID NO: 5175 - DNA, 21 bp, Homo sapiens
cccatgtgacraaggcctaga

SEQ ID NO: 5176 - DNA, 21 bp, Homo sapiens
cactcttactsaatatagtga

SEQ ID NO: 5177 - DNA, 21 bp, Homo sapiens
cccttgccctrattacccagg

SEQ ID NO: 5178 - DNA, 21 bp, Homo sapiens
aaaaatatttyttaaatcaaa

SEQ ID NO: 5179 - DNA, 21 bp, Homo sapiens
cagtgtaatayatgtttaaat

SEQ ID NO: 5180 - DNA, 21 bp, Homo sapiens
gcctcagccaraaatgaccga

SEQ ID NO: 5181 - DNA, 21 bp, Homo sapiens
ggttcacctgmaagcaaaaat

SEQ ID NO: 5182 - DNA, 21 bp, Homo sapiens
ggtatttttgrtaaaattttc

SEQ ID NO: 5183 - DNA, 21 bp, Homo sapiens
aattactttcmttaatgtggc

SEQ ID NO: 5184 - DNA, 21 bp, Homo sapiens
aactctgtctyttatttgttt

SEQ ID NO: 5185 - DNA, 21 bp, Homo sapiens
atttgaggtayatgtagtcca

SEQ ID NO: 5186 - DNA, 21 bp, Homo sapiens
ctacactcctraaggttcttc

SEQ ID NO: 5187 - DNA, 21 bp, Homo sapiens
aaacctcccayattttaagtc

SEQ ID NO: 5188 - DNA, 21 bp, Homo sapiens
caatctgcatsaactttattc

SEQ ID NO: 5189 - DNA, 21 bp, Homo sapiens
ggggaagttayaaacatattt

SEQ ID NO: 5190 - DNA, 21 bp, Homo sapiens
tttcttttttyagttcctcaa

SEQ ID NO: 5191 - DNA, 21 bp, Homo sapiens
gaaaaaagatwagtataatgc

SEQ ID NO: 5192 - DNA, 21 bp, Homo sapiens
gatttctctaygtttgcaagt

SEQ ID NO: 5193 - DNA, 21 bp, Homo sapiens
cactctgtatrtgcttttgat

SEQ ID NO: 5194 - DNA, 21 bp, Homo sapiens
atgcaagggtytcaattcctc

SEQ ID NO: 5195 - DNA, 21 bp, Homo sapiens
gtaaataattytccccattgt

SEQ ID NO: 5196 - DNA, 21 bp, Homo sapiens
atggggatgakcctccctgag

SEQ ID NO: 5197 - DNA, 21 bp, Homo sapiens
ttccagcttawataccctctc

SEQ ID NO: 5198 - DNA, 21 bp, Homo sapiens
gtttcctttgyctgaaatgct

SEQ ID NO: 5199 - DNA, 21 bp, Homo sapiens
acaattagagygctcagtgat

SEQ ID NO: 5200 - DNA, 21 bp, Homo sapiens
tggcccccaayagccatcttt

SEQ ID NO: 5201 - DNA, 21 bp, Homo sapiens
ttttgggcatygtggataccc

SEQ ID NO: 5202 - DNA, 21 bp, Homo sapiens
ggtatcacaaygtaacacagt

SEQ ID NO: 5203 - DNA, 21 bp, Homo sapiens
ggggagtggtscaccacccct

SEQ ID NO: 5204 - DNA, 21 bp, Homo sapiens
ccaagctcctscgttagcggc

SEQ ID NO: 5205 - DNA, 21 bp, Homo sapiens
gtatatatatrtatgttactt

SEQ ID NO: 5206 - DNA, 21 bp, Homo sapiens
tagcagttttragtagcttaa

SEQ ID NO: 5207 - DNA, 21 bp, Homo sapiens
actttccaggyttccccccac

SEQ ID NO: 5208 - DNA, 21 bp, Homo sapiens
gaaaaaaataytttgattcac

SEQ ID NO: 5209 - DNA, 21 bp, Homo sapiens
agttaagagtyagggtacttt

SEQ ID NO: 5210 - DNA, 21 bp, Homo sapiens
attatgatcarctaactagat

SEQ ID NO: 5211 - DNA, 21 bp, Homo sapiens
gtcctcaagcrtttggtatct

SEQ ID NO: 5212 - DNA, 21 bp, Homo sapiens
gtagaatggtrgagtggaagg

SEQ ID NO: 5213 - DNA, 21 bp, Homo sapiens
acgcagaaatkgttttcatag

SEQ ID NO: 5214 - DNA, 21 bp, Homo sapiens
ctgactgactmctcagtatcc

SEQ ID NO: 5215 - DNA, 21 bp, Homo sapiens
tttacagactrtgtatgccca

SEQ ID NO: 5216 - DNA, 21 bp, Homo sapiens
ctggaggtggkgttcagatcc

SEQ ID NO: 5217 - DNA, 21 bp, Homo sapiens
cctctgggttyggtgttgcct

SEQ ID NO: 5218 - DNA, 21 bp, Homo sapiens
tcagtgaaaamtaactcgaaa

SEQ ID NO: 5219 - DNA, 21 bp, Homo sapiens
agtgtgaggaytataaagaag

SEQ ID NO: 5220 - DNA, 21 bp, Homo sapiens
gttgtagcccrgagtttgctg

SEQ ID NO: 5221 - DNA, 21 bp, Homo sapiens
ttccttttggrgcccttattc

SEQ ID NO: 5222 - DNA, 21 bp, Homo sapiens
gaagtccctgsccaaggcacc

SEQ ID NO: 5223 - DNA, 21 bp, Homo sapiens
atatgtagatktagacaggat

SEQ ID NO: 5224 - DNA, 21 bp, Homo sapiens
agctggttgcrgtgatgtttc

SEQ ID NO: 5225 - DNA, 21 bp, Homo sapiens
tttcacctcastattattact

SEQ ID NO: 5226 - DNA, 21 bp, Homo sapiens
cctcatttgarttccagaaaa

SEQ ID NO: 5227 - DNA, 21 bp, Homo sapiens
atctgttttgrttacaaaatc

SEQ ID NO: 5228 - DNA, 21 bp, Homo sapiens
cacaaactctrtcagttttta

SEQ ID NO: 5229 - DNA, 21 bp, Homo sapiens
ataggaatctyaagaagccac

SEQ ID NO: 5230 - DNA, 21 bp, Homo sapiens
aaaatgaattmtttttagtcc

SEQ ID NO: 5231 - DNA, 21 bp, Homo sapiens
atatgcaatawttgggggaat

SEQ ID NO: 5232 - DNA, 21 bp, Homo sapiens
gtgagaatatmgagtttgttt

SEQ ID NO: 5233 - DNA, 21 bp, Homo sapiens
ttgtttcttayaggtccgaac

SEQ ID NO: 5234 - DNA, 21 bp, Homo sapiens
caatctgaaaragaataaatg

SEQ ID NO: 5235 - DNA, 21 bp, Homo sapiens
tatttaagttytctttgatag

SEQ ID NO: 5236 - DNA, 21 bp, Homo sapiens
gctgtcacatrtacctaatat

SEQ ID NO: 5237 - DNA, 21 bp, Homo sapiens
ttgggtggaaktgttgagaag

SEQ ID NO: 5238 - DNA, 21 bp, Homo sapiens
tgtaattaaartgtcattttg

SEQ ID NO: 5239 - DNA, 21 bp, Homo sapiens
acaaacttagkaagtgtttct

SEQ ID NO: 5240 - DNA, 21 bp, Homo sapiens
atgagcccttmgggaaaggtt

SEQ ID NO: 5241 - DNA, 21 bp, Homo sapiens
cacctccagtyctgcccttcc

SEQ ID NO: 5242 - DNA, 21 bp, Homo sapiens
ccctcagtaamtactgctttt

SEQ ID NO: 5243 - DNA, 21 bp, Homo sapiens
tctaaaggtamaaactgagaa

SEQ ID NO: 5244 - DNA, 21 bp, Homo sapiens
aaaaggacatsggtttgatgt

SEQ ID NO: 5245 - DNA, 21 bp, Homo sapiens
ctcacagatcygaccactcct

SEQ ID NO: 5246 - DNA, 21 bp, Homo sapiens
ggaagcacagratagaagaag

SEQ ID NO: 5247 - DNA, 21 bp, Homo sapiens
gctttggaaargaactataat

SEQ ID NO: 5248 - DNA, 21 bp, Homo sapiens
atagcaacccygtggccaggg

SEQ ID NO: 5249 - DNA, 21 bp, Homo sapiens
tagcttttggytctctgtggc

SEQ ID NO: 5250 - DNA, 21 bp, Homo sapiens
aagtacactayacaagcattg

SEQ ID NO: 5251 - DNA, 21 bp, Homo sapiens
cctagaagtcyaagagaaaca

SEQ ID NO: 5252 - DNA, 21 bp, Homo sapiens
ataaaactttwtgaagtttta

SEQ ID NO: 5253 - DNA, 21 bp, Homo sapiens
ctgagctaaaygggttataac

SEQ ID NO: 5254 - DNA, 21 bp, Homo sapiens
taggctgacamactcaggaga

SEQ ID NO: 5255 - DNA, 21 bp, Homo sapiens
gcaaatgtgasaaacattcca

SEQ ID NO: 5256 - DNA, 21 bp, Homo sapiens
agcactatatragagctccca

SEQ ID NO: 5257 - DNA, 21 bp, Homo sapiens
atgattgcccrcatggtatat

SEQ ID NO: 5258 - DNA, 21 bp, Homo sapiens
tttacattctrtgtttactga

SEQ ID NO: 5259 - DNA, 21 bp, Homo sapiens
tagtggcagtrgattaaacat

SEQ ID NO: 5260 - DNA, 21 bp, Homo sapiens
tacattttgtyaatcaggaaa

SEQ ID NO: 5261 - DNA, 21 bp, Homo sapiens
ccagtataatktaaatacccc

SEQ ID NO: 5262 - DNA, 21 bp, Homo sapiens
tgtgtgtgtgygcgcgcgtgt

SEQ ID NO: 5263 - DNA, 21 bp, Homo sapiens
agaatggttaraaacataaca

SEQ ID NO: 5264 - DNA, 21 bp, Homo sapiens
cattggtcaartgatgtccac

SEQ ID NO: 5265 - DNA, 21 bp, Homo sapiens
gagtcatcttwgtactatcca

SEQ ID NO: 5266 - DNA, 21 bp, Homo sapiens
cactgaaaaaytggaaataaa

SEQ ID NO: 5267 - DNA, 21 bp, Homo sapiens
caaacagcaaraacttaaatg

SEQ ID NO: 5268 - DNA, 21 bp, Homo sapiens
cagtgaacacrctttactttc

SEQ ID NO: 5269 - DNA, 21 bp, Homo sapiens
gcaggaactcmaatacttaaa

SEQ ID NO: 5270 - DNA, 21 bp, Homo sapiens
tatcttaatayagccaaaaag

SEQ ID NO: 5271 - DNA, 21 bp, Homo sapiens
ggtgaagccayggggtttctg

SEQ ID NO: 5272 - DNA, 21 bp, Homo sapiens
gccactgtggycaccatctgt

SEQ ID NO: 5273 - DNA, 21 bp, Homo sapiens
aaaaaaaaaamaaccaacttc

SEQ ID NO: 5274 - DNA, 21 bp, Homo sapiens
aaatcaacaaygtgggttccg

SEQ ID NO: 5275 - DNA, 21 bp, Homo sapiens
aggtacaagtrtactctattt

SEQ ID NO: 5276 - DNA, 21 bp, Homo sapiens
ttgacttctgragccccatac

SEQ ID NO: 5277 - DNA, 21 bp, Homo sapiens
agctgcctagmatatctatta

SEQ ID NO: 5278 - DNA, 21 bp, Homo sapiens
gtcagtaaacmaacatattaa

SEQ ID NO: 5279 - DNA, 21 bp, Homo sapiens
tttgggttcaraagaggatcc

SEQ ID NO: 5280 - DNA, 21 bp, Homo sapiens
ttagtccaagycaccatctgc

SEQ ID NO: 5281 - DNA, 21 bp, Homo sapiens
tgccatgattktaaggttcct

SEQ ID NO: 5282 - DNA, 21 bp, Homo sapiens
catgtttcccygtttctttat

SEQ ID NO: 5283 - DNA, 21 bp, Homo sapiens
acaaatcctcyggagcagcaa

SEQ ID NO: 5284 - DNA, 21 bp, Homo sapiens
cttctcccaayaaaatatcag

SEQ ID NO: 5285 - DNA, 21 bp, Homo sapiens
aaaagaagtgyaatggtgaaa

SEQ ID NO: 5286 - DNA, 21 bp, Homo sapiens
ggaacagccaytgtagaatgt

SEQ ID NO: 5287 - DNA, 21 bp, Homo sapiens
taaataattayccagtcccaa

SEQ ID NO: 5288 - DNA, 21 bp, Homo sapiens
agaagattttsaagactcttt

SEQ ID NO: 5289 - DNA, 21 bp, Homo sapiens
gcaaatgattmttgcccatag

SEQ ID NO: 5290 - DNA, 21 bp, Homo sapiens
atgagtgtttytacagataaa

SEQ ID NO: 5291 - DNA, 21 bp, Homo sapiens
aaataactaayacagaaattc

SEQ ID NO: 5292 - DNA, 21 bp, Homo sapiens
acattatatartaatgaagtt

SEQ ID NO: 5293 - DNA, 21 bp, Homo sapiens
acaattaactycacagtcatt

SEQ ID NO: 5294 - DNA, 21 bp, Homo sapiens
ctgaaaagatracaaagatct

SEQ ID NO: 5295 - DNA, 21 bp, Homo sapiens
ctaacgttgaytatcttggca

SEQ ID NO: 5296 - DNA, 21 bp, Homo sapiens
ctgcctggttwgtgggagaaa

SEQ ID NO: 5297 - DNA, 21 bp, Homo sapiens
agggtcagcamtacaattaaa

SEQ ID NO: 5298 - DNA, 21 bp, Homo sapiens
ctcttctgttwtcaaccctcc

SEQ ID NO: 5299 - DNA, 21 bp, Homo sapiens
gatcaaagackaatattcctt

SEQ ID NO: 5300 - DNA, 21 bp, Homo sapiens
tatcaattaawttaaaaagta

SEQ ID NO: 5301 - DNA, 21 bp, Homo sapiens
tacaatagtcrcaatgcccaa

SEQ ID NO: 5302 - DNA, 21 bp, Homo sapiens
ctggggatagrcttacttgta

SEQ ID NO: 5303 - DNA, 21 bp, Homo sapiens
aagtgtactgracagttaagg

SEQ ID NO: 5304 - DNA, 21 bp, Homo sapiens
ctattaagttwcttctaatta

SEQ ID NO: 5305 - DNA, 21 bp, Homo sapiens
actaagtacartgagaatccg

SEQ ID NO: 5306 - DNA, 21 bp, Homo sapiens
aatgagaatcygctgaagagg

SEQ ID NO: 5307 - DNA, 21 bp, Homo sapiens
aggttcaggcycacatttgaa

SEQ ID NO: 5308 - DNA, 21 bp, Homo sapiens
tgctggaaatwacttcagtga

SEQ ID NO: 5309 - DNA, 21 bp, Homo sapiens
gtaagaattawgtaaaataaa

SEQ ID NO: 5310 - DNA, 21 bp, Homo sapiens
tgcatcccccycttcaaattc

SEQ ID NO: 5311 - DNA, 21 bp, Homo sapiens
tgctttatgtktttatgtccc

SEQ ID NO: 5312 - DNA, 21 bp, Homo sapiens
ctcttcatcaytactataccc

SEQ ID NO: 5313 - DNA, 21 bp, Homo sapiens
gtaaaggagcygaaagttttc

SEQ ID NO: 5314 - DNA, 21 bp, Homo sapiens
ttgccataatrgttcatattt

SEQ ID NO: 5315 - DNA, 21 bp, Homo sapiens
gagaaagaacrgaaagcagat

SEQ ID NO: 5316 - DNA, 21 bp, Homo sapiens
tgaaaattacmatttaatttg

SEQ ID NO: 5317 - DNA, 21 bp, Homo sapiens
tgcttagttcygcattatgca

SEQ ID NO: 5318 - DNA, 21 bp, Homo sapiens
aacctcccgtktggttagtaa

SEQ ID NO: 5319 - DNA, 21 bp, Homo sapiens
ttagactatcycatatgactc

SEQ ID NO: 5320 - DNA, 21 bp, Homo sapiens
ttatgctatgsgagccactat

SEQ ID NO: 5321 - DNA, 21 bp, Homo sapiens
tcttgtgagastggaaaagtc

SEQ ID NO: 5322 - DNA, 21 bp, Homo sapiens
aaatttttctrtgaagctgta

SEQ ID NO: 5323 - DNA, 21 bp, Homo sapiens
ggcttcaggtrtctacagctt

SEQ ID NO: 5324 - DNA, 21 bp, Homo sapiens
caataaataayataaaagtga

SEQ ID NO: 5325 - DNA, 21 bp, Homo sapiens
gtatttgctgytgaaaaacca

SEQ ID NO: 5326 - DNA, 21 bp, Homo sapiens
cttactcttcrccatctcctg

SEQ ID NO: 5327 - DNA, 21 bp, Homo sapiens
tctcatgcagwggtgcatgct

SEQ ID NO: 5328 - DNA, 21 bp, Homo sapiens
atgcagatggrtcctcactct

SEQ ID NO: 5329 - DNA, 21 bp, Homo sapiens
aagtgcctatyagtggaataa

SEQ ID NO: 5330 - DNA, 21 bp, Homo sapiens
catgcattgcrttctcttgta

SEQ ID NO: 5331 - DNA, 21 bp, Homo sapiens
tgaaacgcttwttagagtctc

SEQ ID NO: 5332 - DNA, 21 bp, Homo sapiens
acatgaatcakgtcactattc

SEQ ID NO: 5333 - DNA, 21 bp, Homo sapiens
gttagaatctytgaagaatac

SEQ ID NO: 5334 - DNA, 21 bp, Homo sapiens
tctccagggcyaggttggtga

SEQ ID NO: 5335 - DNA, 21 bp, Homo sapiens
ggaagcatatrataaagttta

SEQ ID NO: 5336 - DNA, 21 bp, Homo sapiens
aggttttggartcaaagaata

SEQ ID NO: 5337 - DNA, 21 bp, Homo sapiens
acagttacagraaaagcttag

SEQ ID NO: 5338 - DNA, 21 bp, Homo sapiens
agcagaggggrtttccttatc

SEQ ID NO: 5339 - DNA, 21 bp, Homo sapiens
ttatatgtatwtttttagact

SEQ ID NO: 5340 - DNA, 21 bp, Homo sapiens
aattaaaccaygcacagtcat

SEQ ID NO: 5341 - DNA, 21 bp, Homo sapiens
aataacctggmaatgaggcct

SEQ ID NO: 5342 - DNA, 21 bp, Homo sapiens
actctgtatcygaaaccagag

SEQ ID NO: 5343 - DNA, 21 bp, Homo sapiens
tgaaaagttgrtaagtttaat

SEQ ID NO: 5344 - DNA, 21 bp, Homo sapiens
ctggaatgctrggaagctcac

SEQ ID NO: 5345 - DNA, 21 bp, Homo sapiens
tctttctgtcytttttattca

SEQ ID NO: 5346 - DNA, 21 bp, Homo sapiens
aaaataaaacmtaacacacag

SEQ ID NO: 5347 - DNA, 21 bp, Homo sapiens
caggcctagarttaccagcta

SEQ ID NO: 5348 - DNA, 21 bp, Homo sapiens
ttctctggctrcaccactgga

SEQ ID NO: 5349 - DNA, 21 bp, Homo sapiens
tctttcttttrtttttaatat

SEQ ID NO: 5350 - DNA, 21 bp, Homo sapiens
caagcctgacktacctgcctt

SEQ ID NO: 5351 - DNA, 21 bp, Homo sapiens
gttcctgatartaaaactgca

SEQ ID NO: 5352 - DNA, 21 bp, Homo sapiens
ggctcttttcytctttctact

SEQ ID NO: 5353 - DNA, 21 bp, Homo sapiens
ctggcagaagrgcattgtaaa

SEQ ID NO: 5354 - DNA, 21 bp, Homo sapiens
aattgatggargccagattaa

SEQ ID NO: 5355 - DNA, 21 bp, Homo sapiens
aaaaggttagmataaaagtga

SEQ ID NO: 5356 - DNA, 21 bp, Homo sapiens
ctcatttctcyagttgcagaa

SEQ ID NO: 5357 - DNA, 21 bp, Homo sapiens
ataaaaatgcrtgaatgatag

SEQ ID NO: 5358 - DNA, 21 bp, Homo sapiens
caaaatgtagyttatatttta

SEQ ID NO: 5359 - DNA, 21 bp, Homo sapiens
tcctcactctstattgaagac

SEQ ID NO: 5360 - DNA, 21 bp, Homo sapiens
caggggatgaytgaaaggttt

SEQ ID NO: 5361 - DNA, 21 bp, Homo sapiens
tctctgatttygtctttaatc

SEQ ID NO: 5362 - DNA, 21 bp, Homo sapiens
tgcctaacctytttactccgc

SEQ ID NO: 5363 - DNA, 21 bp, Homo sapiens
taatatacagytatgtaaaag

SEQ ID NO: 5364 - DNA, 21 bp, Homo sapiens
ctcctgacacraaatgtggga

SEQ ID NO: 5365 - DNA, 21 bp, Homo sapiens
taattcagaawaattgttgtt

SEQ ID NO: 5366 - DNA, 21 bp, Homo sapiens
gtctctaaaayccaagccctg

SEQ ID NO: 5367 - DNA, 21 bp, Homo sapiens
tgttcatagtsatctcacgct

SEQ ID NO: 5368 - DNA, 21 bp, Homo sapiens
tgggatatttkggggctagaa

SEQ ID NO: 5369 - DNA, 21 bp, Homo sapiens
gggaaaaaagrtaacatagga

SEQ ID NO: 5370 - DNA, 21 bp, Homo sapiens
tttagttgtcmgttttctata

SEQ ID NO: 5371 - DNA, 21 bp, Homo sapiens
gctacttggakattctcattc

SEQ ID NO: 5372 - DNA, 21 bp, Homo sapiens
atacagtcctsatccatcagt

SEQ ID NO: 5373 - DNA, 21 bp, Homo sapiens
tgttatttcaygtatttgttt

SEQ ID NO: 5374 - DNA, 21 bp, Homo sapiens
taccccattgygatctctcac

SEQ ID NO: 5375 - DNA, 21 bp, Homo sapiens
cagtaggcacrgtggctaggg

SEQ ID NO: 5376 - DNA, 21 bp, Homo sapiens
aaggttgcatrtttgaaagca

SEQ ID NO: 5377 - DNA, 21 bp, Homo sapiens
cagtatctcamctcaagctat

SEQ ID NO: 5378 - DNA, 21 bp, Homo sapiens
agaaacagaarttacccataa

SEQ ID NO: 5379 - DNA, 21 bp, Homo sapiens
tgagtcttacrttgtgaaaag

SEQ ID NO: 5380 - DNA, 21 bp, Homo sapiens
aaatgatttgygcaaagtcac

SEQ ID NO: 5381 - DNA, 21 bp, Homo sapiens
tagcagctacsggctgggctt

SEQ ID NO: 5382 - DNA, 21 bp, Homo sapiens
tagtagcacaktaacacttgc

SEQ ID NO: 5383 - DNA, 21 bp, Homo sapiens
tctgcctgccrttttgaatat

SEQ ID NO: 5384 - DNA, 21 bp, Homo sapiens
taaatgccagkttgcaaaaat

SEQ ID NO: 5385 - DNA, 21 bp, Homo sapiens
gattcttactrtgctatctgc

SEQ ID NO: 5386 - DNA, 21 bp, Homo sapiens
cagggatccaygcccttgact

SEQ ID NO: 5387 - DNA, 21 bp, Homo sapiens
ttttattagargactgtgtta

SEQ ID NO: 5388 - DNA, 21 bp, Homo sapiens
attatagaacwtgccaacaat

SEQ ID NO: 5389 - DNA, 21 bp, Homo sapiens
ccataatttaytgggatagtc

SEQ ID NO: 5390 - DNA, 21 bp, Homo sapiens
ttatgctttarcatgtgaatg

SEQ ID NO: 5391 - DNA, 21 bp, Homo sapiens
gatttggctgyatccccacca

SEQ ID NO: 5392 - DNA, 21 bp, Homo sapiens
actgtttcctyaaacgatcca

SEQ ID NO: 5393 - DNA, 21 bp, Homo sapiens
tgaatgtttckttttaagtga

SEQ ID NO: 5394 - DNA, 21 bp, Homo sapiens
tccgagtaaaratgagtttaa

SEQ ID NO: 5395 - DNA, 21 bp, Homo sapiens
cagttttcagmgcgttaaata

SEQ ID NO: 5396 - DNA, 21 bp, Homo sapiens
ttctcaagtcytagattctga

SEQ ID NO: 5397 - DNA, 21 bp, Homo sapiens
taagataagcmcttatatcat

SEQ ID NO: 5398 - DNA, 21 bp, Homo sapiens
cctggaatagygtaattgttc

SEQ ID NO: 5399 - DNA, 21 bp, Homo sapiens
atatttatgtrgtctttaaag

SEQ ID NO: 5400 - DNA, 21 bp, Homo sapiens
aatgagagttkcaaccagaaa

SEQ ID NO: 5401 - DNA, 21 bp, Homo sapiens
taacaaactgycacaaaagct

SEQ ID NO: 5402 - DNA, 21 bp, Homo sapiens
gccaggatatrgggctgggaa

SEQ ID NO: 5403 - DNA, 21 bp, Homo sapiens
tcccaaggcckcagctacacc

SEQ ID NO: 5404 - DNA, 21 bp, Homo sapiens
aatattttcaygaattttaca

SEQ ID NO: 5405 - DNA, 21 bp, Homo sapiens
tcatcattcargaagaattat

SEQ ID NO: 5406 - DNA, 21 bp, Homo sapiens
tgtacggccaygttttatata

SEQ ID NO: 5407 - DNA, 21 bp, Homo sapiens
tggagttcacygttttttcat

SEQ ID NO: 5408 - DNA, 21 bp, Homo sapiens
ttattctgttrggcttttctt

SEQ ID NO: 5409 - DNA, 21 bp, Homo sapiens
gaaaaataatmattattatta

SEQ ID NO: 5410 - DNA, 21 bp, Homo sapiens
tatcaataaaygttatctact

SEQ ID NO: 5411 - DNA, 21 bp, Homo sapiens
atgtcagccayatttggtagt

SEQ ID NO: 5412 - DNA, 21 bp, Homo sapiens
tctttaatttsagggaagcag

SEQ ID NO: 5413 - DNA, 21 bp, Homo sapiens
tctgtttcctraggagaaaaa

SEQ ID NO: 5414 - DNA, 21 bp, Homo sapiens
tattgcatcargagttaagca

SEQ ID NO: 5415 - DNA, 21 bp, Homo sapiens
ttatagctctrctagtctcct

SEQ ID NO: 5416 - DNA, 21 bp, Homo sapiens
acagaaaggcrgagtggatat

SEQ ID NO: 5417 - DNA, 21 bp, Homo sapiens
tgctcaaaccygttacaggag

SEQ ID NO: 5418 - DNA, 21 bp, Homo sapiens
gggtggatgcytgtgactccc

SEQ ID NO: 5419 - DNA, 21 bp, Homo sapiens
gctgtccagcsgccgatctcc

SEQ ID NO: 5420 - DNA, 21 bp, Homo sapiens
ggagtttatgwgggtacagga

SEQ ID NO: 5421 - DNA, 21 bp, Homo sapiens
gagcttctgayccaccaacct

SEQ ID NO: 5422 - DNA, 21 bp, Homo sapiens
ttaaaggcttragggaagggc

SEQ ID NO: 5423 - DNA, 21 bp, Homo sapiens
cttgaagatgytcattaattt

SEQ ID NO: 5424 - DNA, 21 bp, Homo sapiens
tttttcttgargtcatcatct

SEQ ID NO: 5425 - DNA, 21 bp, Homo sapiens
atagtgtcagwtcctacaact

SEQ ID NO: 5426 - DNA, 21 bp, Homo sapiens
acataggggcrgccagccact

SEQ ID NO: 5427 - DNA, 21 bp, Homo sapiens
cccttggcccrataatgttga

SEQ ID NO: 5428 - DNA, 21 bp, Homo sapiens
attagtgcttrttaaggtttt

SEQ ID NO: 5429 - DNA, 21 bp, Homo sapiens
ccatggaactscatctagtag

SEQ ID NO: 5430 - DNA, 21 bp, Homo sapiens
ggcaagacaaracatttataa

SEQ ID NO: 5431 - DNA, 21 bp, Homo sapiens
cccttctatayttttcaagca

SEQ ID NO: 5432 - DNA, 21 bp, Homo sapiens
gttagcacagyagggcttgtg

SEQ ID NO: 5433 - DNA, 21 bp, Homo sapiens
atagttgttaygctttaaatt

SEQ ID NO: 5434 - DNA, 21 bp, Homo sapiens
tgtttcagtcmtatgtctaac

SEQ ID NO: 5435 - DNA, 21 bp, Homo sapiens
taggtaccagkgttgctcacc

SEQ ID NO: 5436 - DNA, 21 bp, Homo sapiens
ttagtggacayaccttgaagt

SEQ ID NO: 5437 - DNA, 21 bp, Homo sapiens
agtcttttagkaattgcccat

SEQ ID NO: 5438 - DNA, 21 bp, Homo sapiens
gaggaaactgmaacttagagt

SEQ ID NO: 5439 - DNA, 21 bp, Homo sapiens
aaattcaaatmcttttctttc

SEQ ID NO: 5440 - DNA, 21 bp, Homo sapiens
gtgaagtgtcrtaaagaaaca

SEQ ID NO: 5441 - DNA, 21 bp, Homo sapiens
tcaatcaattrcaagccaagt

SEQ ID NO: 5442 - DNA, 21 bp, Homo sapiens
gtttaattcamacccaggtat

SEQ ID NO: 5443 - DNA, 21 bp, Homo sapiens
tgggtaatatrtgttgaataa

SEQ ID NO: 5444 - DNA, 21 bp, Homo sapiens
agaatttataygaaatttgca

SEQ ID NO: 5445 - DNA, 21 bp, Homo sapiens
tgtggcctaargtaaaggtta

SEQ ID NO: 5446 - DNA, 21 bp, Homo sapiens
agatcattccraactgggtag

SEQ ID NO: 5447 - DNA, 21 bp, Homo sapiens
ctttactacayggcgttttcc

SEQ ID NO: 5448 - DNA, 21 bp, Homo sapiens
taggttatggkgtcctgatgg

SEQ ID NO: 5449 - DNA, 21 bp, Homo sapiens
tctccatacakcataagtgcc

SEQ ID NO: 5450 - DNA, 21 bp, Homo sapiens
ttctgactgastatgaggcaa

SEQ ID NO: 5451 - DNA, 21 bp, Homo sapiens
tattgtttatractattttag

SEQ ID NO: 5452 - DNA, 21 bp, Homo sapiens
gaagttatctyagggcctctc

SEQ ID NO: 5453 - DNA, 21 bp, Homo sapiens
gttctttgccraattggcact

SEQ ID NO: 5454 - DNA, 21 bp, Homo sapiens
atgtaaaaagrtgtctgagat

SEQ ID NO: 5455 - DNA, 21 bp, Homo sapiens
ttaagtttttygaactttccc

SEQ ID NO: 5456 - DNA, 21 bp, Homo sapiens
aaaactttagmctcggcatca

SEQ ID NO: 5457 - DNA, 21 bp, Homo sapiens
actttagcctyggcatcagga

SEQ ID NO: 5458 - DNA, 21 bp, Homo sapiens
ttcctgataamccctggccct

SEQ ID NO: 5459 - DNA, 21 bp, Homo sapiens
aaataaaatamtttttaaaag

SEQ ID NO: 5460 - DNA, 21 bp, Homo sapiens
ttttctgcccragagactaag

SEQ ID NO: 5461 - DNA, 21 bp, Homo sapiens
gcttagtcggsttgggtggct

SEQ ID NO: 5462 - DNA, 21 bp, Homo sapiens
gtggtcaaaakcaatatgaga

SEQ ID NO: 5463 - DNA, 21 bp, Homo sapiens
tcttctgcctmatttcttaaa

SEQ ID NO: 5464 - DNA, 21 bp, Homo sapiens
agtacctgttytgatggcaaa

SEQ ID NO: 5465 - DNA, 21 bp, Homo sapiens
gcctccttttygccccctaga

SEQ ID NO: 5466 - DNA, 21 bp, Homo sapiens
gcaaacttcgygggggagaaa

SEQ ID NO: 5467 - DNA, 21 bp, Homo sapiens
ggtagggggtrgagagaggca

SEQ ID NO: 5468 - DNA, 21 bp, Homo sapiens
ggggcatgtcstgcttcttgg

SEQ ID NO: 5469 - DNA, 21 bp, Homo sapiens
cttctatactyaggagactgg

SEQ ID NO: 5470 - DNA, 21 bp, Homo sapiens
ctctggaattrtgctgtggtt

SEQ ID NO: 5471 - DNA, 21 bp, Homo sapiens
agacggggttkggggggaacc

SEQ ID NO: 5472 - DNA, 21 bp, Homo sapiens
tgttaggttgycagggacaga

SEQ ID NO: 5473 - DNA, 21 bp, Homo sapiens
aaaagagtttrccaatattat

SEQ ID NO: 5474 - DNA, 21 bp, Homo sapiens
ttctgttatawatgttctaaa

SEQ ID NO: 5475 - DNA, 21 bp, Homo sapiens
atttgcaattytagaatcgga

SEQ ID NO: 5476 - DNA, 21 bp, Homo sapiens
tttcttatcaygctggcgaaa

SEQ ID NO: 5477 - DNA, 21 bp, Homo sapiens
ttcttatcacrctggcgaaaa

SEQ ID NO: 5478 - DNA, 21 bp, Homo sapiens
tagtctgaacrttgtccccat

SEQ ID NO: 5479 - DNA, 21 bp, Homo sapiens
caaagttctarttgatgcagg

SEQ ID NO: 5480 - DNA, 21 bp, Homo sapiens
acacagatcarattagaatct

SEQ ID NO: 5481 - DNA, 21 bp, Homo sapiens
gattcagtttytttttcctta

SEQ ID NO: 5482 - DNA, 21 bp, Homo sapiens
gaaaaagaggygaggaaacag

SEQ ID NO: 5483 - DNA, 21 bp, Homo sapiens
aatagcacaaycctaaattcc

SEQ ID NO: 5484 - DNA, 21 bp, Homo sapiens
gccacctaaaygttgaaggcc

SEQ ID NO: 5485 - DNA, 21 bp, Homo sapiens
taccttcaaawtatattcaga

SEQ ID NO: 5486 - DNA, 21 bp, Homo sapiens
actacacatcytactcattaa

SEQ ID NO: 5487 - DNA, 21 bp, Homo sapiens
atcttaatcamcatcatcatc

SEQ ID NO: 5488 - DNA, 21 bp, Homo sapiens
tcatagtaacwgtggcagagc

SEQ ID NO: 5489 - DNA, 21 bp, Homo sapiens
gcagttctctyagtgaaaaga

SEQ ID NO: 5490 - DNA, 21 bp, Homo sapiens
tccttcctgcwgactgggaag

SEQ ID NO: 5491 - DNA, 21 bp, Homo sapiens
tccgtaacagyggtcatctat

SEQ ID NO: 5492 - DNA, 21 bp, Homo sapiens
gccagaatgamaggaagatgg

SEQ ID NO: 5493 - DNA, 21 bp, Homo sapiens
gccctagctartacaactctc

SEQ ID NO: 5494 - DNA, 21 bp, Homo sapiens
tctttgcaatrgcagatggaa

SEQ ID NO: 5495 - DNA, 21 bp, Homo sapiens
agcaaactgawgcaaatttcc

SEQ ID NO: 5496 - DNA, 21 bp, Homo sapiens
agtgcacaaaraaaatgtatc

SEQ ID NO: 5497 - DNA, 21 bp, Homo sapiens
gaggagatccyggccactgcc

SEQ ID NO: 5498 - DNA, 21 bp, Homo sapiens
cacgggggccycacttcattt

SEQ ID NO: 5499 - DNA, 21 bp, Homo sapiens
aataagtgttraggagcagct

SEQ ID NO: 5500 - DNA, 21 bp, Homo sapiens
taaactataasaagaaccatc

SEQ ID NO: 5501 - DNA, 21 bp, Homo sapiens
acagctaatcrgaacctctat

SEQ ID NO: 5502 - DNA, 21 bp, Homo sapiens
aaattctgtawcaatgtgaaa

SEQ ID NO: 5503 - DNA, 21 bp, Homo sapiens
agtgtgtatasatttaacaga

SEQ ID NO: 5504 - DNA, 21 bp, Homo sapiens
tatgtattaamaccgcagaaa

SEQ ID NO: 5505 - DNA, 21 bp, Homo sapiens
caggagctcargcaatggcat

SEQ ID NO: 5506 - DNA, 21 bp, Homo sapiens
tcaagactttyctttatttcc

SEQ ID NO: 5507 - DNA, 21 bp, Homo sapiens
gcatcaagackgtttcttccc

SEQ ID NO: 5508 - DNA, 21 bp, Homo sapiens
atccatgaacyaaataatcat

SEQ ID NO: 5509 - DNA, 21 bp, Homo sapiens
tcagtcaacarttattaagaa

SEQ ID NO: 5510 - DNA, 21 bp, Homo sapiens
cttgctttgtrtctccaaagg

SEQ ID NO: 5511 - DNA, 21 bp, Homo sapiens
cctggagtaamgcttcaaata

SEQ ID NO: 5512 - DNA, 21 bp, Homo sapiens
caaaacttttrtttgttttac

SEQ ID NO: 5513 - DNA, 21 bp, Homo sapiens
tgtatggtgtraggaagagtt

SEQ ID NO: 5514 - DNA, 21 bp, Homo sapiens
aatacacattyaaaaattcca

SEQ ID NO: 5515 - DNA, 21 bp, Homo sapiens
tgttctcttcytccacagagg

SEQ ID NO: 5516 - DNA, 21 bp, Homo sapiens
acaaaataacygtagcttttg

SEQ ID NO: 5517 - DNA, 21 bp, Homo sapiens
ctttgaatgastggggaaaaa

SEQ ID NO: 5518 - DNA, 21 bp, Homo sapiens
gaaggaagccrtcataagcca

SEQ ID NO: 5519 - DNA, 21 bp, Homo sapiens
catatatttgyacaagtatat

SEQ ID NO: 5520 - DNA, 21 bp, Homo sapiens
aaatataaaaraaaaacctaa

SEQ ID NO: 5521 - DNA, 21 bp, Homo sapiens
ttctgagtttyctcattataa

SEQ ID NO: 5522 - DNA, 21 bp, Homo sapiens
tttttgtaaarataaagaaaa

SEQ ID NO: 5523 - DNA, 21 bp, Homo sapiens
aggcgacacgyggtgagtgac

SEQ ID NO: 5524 - DNA, 21 bp, Homo sapiens
gaaaagaagtratactgcctt

SEQ ID NO: 5525 - DNA, 21 bp, Homo sapiens
accgatagaakagggaaagca

SEQ ID NO: 5526 - DNA, 21 bp, Homo sapiens
ccagtaaaacrtatctctgta

SEQ ID NO: 5527 - DNA, 21 bp, Homo sapiens
ataagtaaggyttcctgaaat

SEQ ID NO: 5528 - DNA, 21 bp, Homo sapiens
ttagatggatsaataagactc

SEQ ID NO: 5529 - DNA, 21 bp, Homo sapiens
taaatggtgayggaaacaaat

SEQ ID NO: 5530 - DNA, 21 bp, Homo sapiens
tcttgataccracctgagagc

SEQ ID NO: 5531 - DNA, 21 bp, Homo sapiens
cacactgctgrcttgcattgc

SEQ ID NO: 5532 - DNA, 21 bp, Homo sapiens
ccagtctataygtcttagagg

SEQ ID NO: 5533 - DNA, 21 bp, Homo sapiens
ctatgtacacmaaagaattaa

SEQ ID NO: 5534 - DNA, 21 bp, Homo sapiens
tttctgcagckgtaggctctt

SEQ ID NO: 5535 - DNA, 21 bp, Homo sapiens
ggactttggartcaacctcac

SEQ ID NO: 5536 - DNA, 21 bp, Homo sapiens
ttcatagaccrttcatctcta

SEQ ID NO: 5537 - DNA, 21 bp, Homo sapiens
acactgaagcwttcttaatat

SEQ ID NO: 5538 - DNA, 21 bp, Homo sapiens
tcttttttctyttactctagg

SEQ ID NO: 5539 - DNA, 21 bp, Homo sapiens
agtaacagtcyctaaaccctt

SEQ ID NO: 5540 - DNA, 21 bp, Homo sapiens
tggatgggccyacacagcacc

SEQ ID NO: 5541 - DNA, 21 bp, Homo sapiens
agaaatgagtkatttcttctt

SEQ ID NO: 5542 - DNA, 21 bp, Homo sapiens
gagtgaagtcraaataagtat

SEQ ID NO: 5543 - DNA, 21 bp, Homo sapiens
ttctttccttwattaagtatc

SEQ ID NO: 5544 - DNA, 21 bp, Homo sapiens
tagattgtttygttgcaatat

SEQ ID NO: 5545 - DNA, 21 bp, Homo sapiens
tattagctcaytgaagttttt

SEQ ID NO: 5546 - DNA, 21 bp, Homo sapiens
ataattagttmtctgcttact

SEQ ID NO: 5547 - DNA, 21 bp, Homo sapiens
gtgtgaggcargtaagttcta

SEQ ID NO: 5548 - DNA, 21 bp, Homo sapiens
ttttcaaatayatgaaacttt

SEQ ID NO: 5549 - DNA, 21 bp, Homo sapiens
gcagagatcaygtcaggaggg

SEQ ID NO: 5550 - DNA, 21 bp, Homo sapiens
tctaccctaarcatacatgga

SEQ ID NO: 5551 - DNA, 21 bp, Homo sapiens
aaacataacarcatatacaaa

SEQ ID NO: 5552 - DNA, 21 bp, Homo sapiens
aagtggccaasccagacacag

SEQ ID NO: 5553 - DNA, 21 bp, Homo sapiens
ctttctgtccrataaagggtt

SEQ ID NO: 5554 - DNA, 21 bp, Homo sapiens
ctcctcgccasgtctctgcaa

SEQ ID NO: 5555 - DNA, 21 bp, Homo sapiens
catccaggggrtgacacacag

SEQ ID NO: 5556 - DNA, 21 bp, Homo sapiens
gcttctgaccrtatagagcca

SEQ ID NO: 5557 - DNA, 21 bp, Homo sapiens
tgagtcttggratcttttgcc

SEQ ID NO: 5558 - DNA, 21 bp, Homo sapiens
ggaagctttaygagttggtct

SEQ ID NO: 5559 - DNA, 21 bp, Homo sapiens
ggttaaatttycatttaattc

SEQ ID NO: 5560 - DNA, 21 bp, Homo sapiens
ggcagattctwtgcttttgta

SEQ ID NO: 5561 - DNA, 21 bp, Homo sapiens
ctgcaggggtkttgagaacat

SEQ ID NO: 5562 - DNA, 21 bp, Homo sapiens
tcctgtaggcwaggattgata

SEQ ID NO: 5563 - DNA, 21 bp, Homo sapiens
acatggtcctrtttacccatc

SEQ ID NO: 5564 - DNA, 21 bp, Homo sapiens
tcctatactayattcatgact

SEQ ID NO: 5565 - DNA, 21 bp, Homo sapiens
aattggatggygtttgtggca

SEQ ID NO: 5566 - DNA, 21 bp, Homo sapiens
ttttctcaacrcattacttcc

SEQ ID NO: 5567 - DNA, 21 bp, Homo sapiens
acttctgctcrtatttctttg

SEQ ID NO: 5568 - DNA, 21 bp, Homo sapiens
tctacatcatraaagacctgt

SEQ ID NO: 5569 - DNA, 21 bp, Homo sapiens
gtttatgatcrtaagactaaa

SEQ ID NO: 5570 - DNA, 21 bp, Homo sapiens
catgaggaaaytgaggcacag

SEQ ID NO: 5571 - DNA, 21 bp, Homo sapiens
ttacagacatrtaaaaaaagt

SEQ ID NO: 5572 - DNA, 21 bp, Homo sapiens
ctctgtcctcraggaaaagca

SEQ ID NO: 5573 - DNA, 21 bp, Homo sapiens
taaacaccaakgtaaaagggc

SEQ ID NO: 5574 - DNA, 21 bp, Homo sapiens
attttaaagaygtatttgagc

SEQ ID NO: 5575 - DNA, 21 bp, Homo sapiens
ccatttctttmcaaaagaacc

SEQ ID NO: 5576 - DNA, 21 bp, Homo sapiens
agggcacagcytaggccaaat

SEQ ID NO: 5577 - DNA, 21 bp, Homo sapiens
aagtgacaatyagattaaatc

SEQ ID NO: 5578 - DNA, 21 bp, Homo sapiens
aaatgaatccsagctctcaca

SEQ ID NO: 5579 - DNA, 21 bp, Homo sapiens
cctaagtgtcrtaagaggaat

SEQ ID NO: 5580 - DNA, 21 bp, Homo sapiens
ccacaactttsaaaagaacta

SEQ ID NO: 5581 - DNA, 21 bp, Homo sapiens
tgttatgacasagccaggaat

SEQ ID NO: 5582 - DNA, 21 bp, Homo sapiens
tacacataaascactctttta

SEQ ID NO: 5583 - DNA, 21 bp, Homo sapiens
gtatggattarcctctagtta

SEQ ID NO: 5584 - DNA, 21 bp, Homo sapiens
cgttaagaccrcttttaagca

SEQ ID NO: 5585 - DNA, 21 bp, Homo sapiens
gggcccccaamgccgcccccg

SEQ ID NO: 5586 - DNA, 21 bp, Homo sapiens
catatcatttkagaacatttc

SEQ ID NO: 5587 - DNA, 21 bp, Homo sapiens
tttggggacasaggatatagg

SEQ ID NO: 5588 - DNA, 21 bp, Homo sapiens
atccaatgacrttctgaatgt

SEQ ID NO: 5589 - DNA, 21 bp, Homo sapiens
tatagttattmgggatctctt

SEQ ID NO: 5590 - DNA, 21 bp, Homo sapiens
atttccagggmaaaagaaacc

SEQ ID NO: 5591 - DNA, 21 bp, Homo sapiens
aataagattgrgtgggagtgg

SEQ ID NO: 5592 - DNA, 21 bp, Homo sapiens
catgcataaayagtctgattc

SEQ ID NO: 5593 - DNA, 21 bp, Homo sapiens
tttgtcctagwgatatactta

SEQ ID NO: 5594 - DNA, 21 bp, Homo sapiens
caagaataccrcagtattttt

SEQ ID NO: 5595 - DNA, 21 bp, Homo sapiens
tggaatagacrtttaatctct

SEQ ID NO: 5596 - DNA, 21 bp, Homo sapiens
attttgttgcyagctataaaa

SEQ ID NO: 5597 - DNA, 21 bp, Homo sapiens
tttaggtgaayatttcagtac

SEQ ID NO: 5598 - DNA, 21 bp, Homo sapiens
aacccttccargaaatctggt

SEQ ID NO: 5599 - DNA, 21 bp, Homo sapiens
cagcaactctygtgaaaaaaa

SEQ ID NO: 5600 - DNA, 21 bp, Homo sapiens
aggcacttccrcctacttcct

SEQ ID NO: 5601 - DNA, 21 bp, Homo sapiens
ttttttcccarccttttctga

SEQ ID NO: 5602 - DNA, 21 bp, Homo sapiens
tccaagtaggrctggttcagt

SEQ ID NO: 5603 - DNA, 21 bp, Homo sapiens
aaaaagaaaamagcacaagtg

SEQ ID NO: 5604 - DNA, 21 bp, Homo sapiens
tctatgttcarcggatatgtc

SEQ ID NO: 5605 - DNA, 21 bp, Homo sapiens
ctctacgaaayattgctatta

SEQ ID NO: 5606 - DNA, 21 bp, Homo sapiens
gctggattttratttttattt

SEQ ID NO: 5607 - DNA, 21 bp, Homo sapiens
tgtgccagaayccatttgaaa

SEQ ID NO: 5608 - DNA, 21 bp, Homo sapiens
aagtaaaaagraagttcagat

SEQ ID NO: 5609 - DNA, 21 bp, Homo sapiens
ctgaaaatcayagacttagaa

SEQ ID NO: 5610 - DNA, 21 bp, Homo sapiens
gatgatgactragctaagctc

SEQ ID NO: 5611 - DNA, 21 bp, Homo sapiens
tgtttaaaatrtattatattt

SEQ ID NO: 5612 - DNA, 21 bp, Homo sapiens
gcaaacattaratgcaaataa

SEQ ID NO: 5613 - DNA, 21 bp, Homo sapiens
ctgggttctgkgttctgtacc

SEQ ID NO: 5614 - DNA, 21 bp, Homo sapiens
ttattgtatcrgactctatct

SEQ ID NO: 5615 - DNA, 21 bp, Homo sapiens
tgagccaatamggctcagtaa

SEQ ID NO: 5616 - DNA, 21 bp, Homo sapiens
ttgcactgagrctatttctaa

SEQ ID NO: 5617 - DNA, 21 bp, Homo sapiens
gctgtactaayctacattccc

SEQ ID NO: 5618 - DNA, 21 bp, Homo sapiens
gtttgctacaytaaaactctt

SEQ ID NO: 5619 - DNA, 21 bp, Homo sapiens
aaaaggactgsccaagtgctt

SEQ ID NO: 5620 - DNA, 21 bp, Homo sapiens
ctgtgggaacwcatctagaag

SEQ ID NO: 5621 - DNA, 21 bp, Homo sapiens
tagggtgaaartagagttctt

SEQ ID NO: 5622 - DNA, 21 bp, Homo sapiens
atgatagtgaygacagtatca

SEQ ID NO: 5623 - DNA, 21 bp, Homo sapiens
tttaccctgayaatgttcatt

SEQ ID NO: 5624 - DNA, 21 bp, Homo sapiens
tgctttcctcygtgctatctc

SEQ ID NO: 5625 - DNA, 21 bp, Homo sapiens
aacccacttgstcatgttgta

SEQ ID NO: 5626 - DNA, 21 bp, Homo sapiens
aatttattggygtaaagttgt

SEQ ID NO: 5627 - DNA, 21 bp, Homo sapiens
tttgattcttyatccaccttc

SEQ ID NO: 5628 - DNA, 21 bp, Homo sapiens
catgcaagaaygtataaattg

SEQ ID NO: 5629 - DNA, 21 bp, Homo sapiens
gtggttgctargggttggagg

SEQ ID NO: 5630 - DNA, 21 bp, Homo sapiens
taataaaaaaygaaggtcagt

SEQ ID NO: 5631 - DNA, 21 bp, Homo sapiens
aacatgtttcstccttatcta

SEQ ID NO: 5632 - DNA, 21 bp, Homo sapiens
gtccctgtacycactagctac

SEQ ID NO: 5633 - DNA, 21 bp, Homo sapiens
acttgaaatcycatgctaaag

SEQ ID NO: 5634 - DNA, 21 bp, Homo sapiens
taaaaacacarctctcccctg

SEQ ID NO: 5635 - DNA, 21 bp, Homo sapiens
atcagacagargcaaattaag

SEQ ID NO: 5636 - DNA, 21 bp, Homo sapiens
aactccagaasaagctcagtt

SEQ ID NO: 5637 - DNA, 21 bp, Homo sapiens
ataagggagaytttcctttat

SEQ ID NO: 5638 - DNA, 21 bp, Homo sapiens
acacatgagasagcatgttgt

SEQ ID NO: 5639 - DNA, 21 bp, Homo sapiens
aatgaagatgmgatgatgcat

SEQ ID NO: 5640 - DNA, 21 bp, Homo sapiens
gcttttttttwaaaaaaaata

SEQ ID NO: 5641 - DNA, 21 bp, Homo sapiens
ctgtacacatrccagtctcag

SEQ ID NO: 5642 - DNA, 21 bp, Homo sapiens
agggtggaacrggaaatcatg

SEQ ID NO: 5643 - DNA, 21 bp, Homo sapiens
tttaaatcttkggtgtgatgg

SEQ ID NO: 5644 - DNA, 21 bp, Homo sapiens
aagtgggagamccgagtgagg

SEQ ID NO: 5645 - DNA, 21 bp, Homo sapiens
tcatcagtctyaacgtccaaa

SEQ ID NO: 5646 - DNA, 21 bp, Homo sapiens
tgtttctcacrgtaaaagata

SEQ ID NO: 5647 - DNA, 21 bp, Homo sapiens
tgaaagcagcrttcaaaatct

SEQ ID NO: 5648 - DNA, 21 bp, Homo sapiens
ggttatagttygtgaaagcag

SEQ ID NO: 5649 - DNA, 21 bp, Homo sapiens
acaaaagagaycagaaatccc

SEQ ID NO: 5650 - DNA, 21 bp, Homo sapiens
tatttacaccygaggctgttc

SEQ ID NO: 5651 - DNA, 21 bp, Homo sapiens
gaaatctctcyaaggatctat

SEQ ID NO: 5652 - DNA, 21 bp, Homo sapiens
ttccattttaygctatattac

SEQ ID NO: 5653 - DNA, 21 bp, Homo sapiens
ggtttatccaygtgtgcttaa

SEQ ID NO: 5654 - DNA, 21 bp, Homo sapiens
ttttgccaccwctgatacctc

SEQ ID NO: 5655 - DNA, 21 bp, Homo sapiens
ctctgtagaayagaaggatgg

SEQ ID NO: 5656 - DNA, 21 bp, Homo sapiens
ctgtggaaggragaaggtgca

SEQ ID NO: 5657 - DNA, 21 bp, Homo sapiens
gttagtaactyaaccaaaatc

SEQ ID NO: 5658 - DNA, 21 bp, Homo sapiens
gacactccccrgagacttcta

SEQ ID NO: 5659 - DNA, 21 bp, Homo sapiens
ccttaaatgaytataacttag

SEQ ID NO: 5660 - DNA, 21 bp, Homo sapiens
taagatactcwtgggataaga

SEQ ID NO: 5661 - DNA, 21 bp, Homo sapiens
gattcctgacrtaagtgagtc

SEQ ID NO: 5662 - DNA, 21 bp, Homo sapiens
attctattccwtttgctatat

SEQ ID NO: 5663 - DNA, 21 bp, Homo sapiens
tttgctacacytaaacctctc

SEQ ID NO: 5664 - DNA, 21 bp, Homo sapiens
attgccctaarttctaaaatt

SEQ ID NO: 5665 - DNA, 21 bp, Homo sapiens
agaattagatrgtaatggctg

SEQ ID NO: 5666 - DNA, 21 bp, Homo sapiens
ttccctcaggmctcccctcca

SEQ ID NO: 5667 - DNA, 21 bp, Homo sapiens
tgatgtttccmaatttctctt

SEQ ID NO: 5668 - DNA, 21 bp, Homo sapiens
aggaagtaggyggtctaaatg

SEQ ID NO: 5669 - DNA, 21 bp, Homo sapiens
acctggagcawgttgcagtgc

SEQ ID NO: 5670 - DNA, 21 bp, Homo sapiens
tctaatgaccrtatttcaaag

SEQ ID NO: 5671 - DNA, 21 bp, Homo sapiens
atctgcatacmaactgaagaa

SEQ ID NO: 5672 - DNA, 21 bp, Homo sapiens
catggtcaagyaggagagaca

SEQ ID NO: 5673 - DNA, 21 bp, Homo sapiens
acacagtggcrtgagaaagca

SEQ ID NO: 5674 - DNA, 21 bp, Homo sapiens
ctgatcagccyctgatggtca

SEQ ID NO: 5675 - DNA, 21 bp, Homo sapiens
caagctagtamattattagga

SEQ ID NO: 5676 - DNA, 21 bp, Homo sapiens
tcgcccaggaycctttactag

SEQ ID NO: 5677 - DNA, 21 bp, Homo sapiens
tcctttttctwattctacatt

SEQ ID NO: 5678 - DNA, 21 bp, Homo sapiens
tgtagcagtgyttcactcatt

SEQ ID NO: 5679 - DNA, 21 bp, Homo sapiens
taccgcccagraatgttgtct

SEQ ID NO: 5680 - DNA, 21 bp, Homo sapiens
gtcactgatayatgttatcag

SEQ ID NO: 5681 - DNA, 21 bp, Homo sapiens
agcaaggaaasaatgaagcca

SEQ ID NO: 5682 - DNA, 21 bp, Homo sapiens
aatagatagamgcctccagct

SEQ ID NO: 5683 - DNA, 21 bp, Homo sapiens
atattattacwttgttctaat

SEQ ID NO: 5684 - DNA, 21 bp, Homo sapiens
aattaacatcrtgcataagaa

SEQ ID NO: 5685 - DNA, 21 bp, Homo sapiens
atgaactcacygagccagact

SEQ ID NO: 5686 - DNA, 21 bp, Homo sapiens
aagaaaagaarcattttaaga

SEQ ID NO: 5687 - DNA, 21 bp, Homo sapiens
cagcctcagtwgtcttccaca

SEQ ID NO: 5688 - DNA, 21 bp, Homo sapiens
agaataggttsagagagtctc

SEQ ID NO: 5689 - DNA, 21 bp, Homo sapiens
tgactccattmgcttagcaat

SEQ ID NO: 5690 - DNA, 21 bp, Homo sapiens
aaattaccggyttgatagatt

SEQ ID NO: 5691 - DNA, 21 bp, Homo sapiens
acaaaggtggktatcgatata

SEQ ID NO: 5692 - DNA, 21 bp, Homo sapiens
tgctttacgaytgatgctctg

SEQ ID NO: 5693 - DNA, 21 bp, Homo sapiens
gcttcaagagmgaaatgacat

SEQ ID NO: 5694 - DNA, 21 bp, Homo sapiens
cacagcattaktttttctatt

SEQ ID NO: 5695 - DNA, 21 bp, Homo sapiens
ttaagagcaakcttatttaaa

SEQ ID NO: 5696 - DNA, 21 bp, Homo sapiens
aggctggtctsgaactcctgg

SEQ ID NO: 5697 - DNA, 21 bp, Homo sapiens
atgcgtctgargtattgaatc

SEQ ID NO: 5698 - DNA, 21 bp, Homo sapiens
ctgggttgtayctaggtgtaa

SEQ ID NO: 5699 - DNA, 21 bp, Homo sapiens
aggaagaaagraagcaagtat

SEQ ID NO: 5700 - DNA, 21 bp, Homo sapiens
atttccatggkttcattctct

SEQ ID NO: 5701 - DNA, 21 bp, Homo sapiens
ttctcgaactwcttctgttaa

SEQ ID NO: 5702 - DNA, 21 bp, Homo sapiens
tcttgagatgsaaagacatat

SEQ ID NO: 5703 - DNA, 21 bp, Homo sapiens
tcattcaccakttgctaaatc

SEQ ID NO: 5704 - DNA, 21 bp, Homo sapiens
agtagagccargtattaccta

SEQ ID NO: 5705 - DNA, 21 bp, Homo sapiens
gttttagagtkccagtgatga

SEQ ID NO: 5706 - DNA, 21 bp, Homo sapiens
tcctttaccaycatcctggga

SEQ ID NO: 5707 - DNA, 21 bp, Homo sapiens
gtgtagttgarcatatttctc

SEQ ID NO: 5708 - DNA, 21 bp, Homo sapiens
catgaataatmtttcccaaat

SEQ ID NO: 5709 - DNA, 21 bp, Homo sapiens
cctctctaagkttcatctctg

SEQ ID NO: 5710 - DNA, 21 bp, Homo sapiens
aatattttcarcattaaattc

SEQ ID NO: 5711 - DNA, 21 bp, Homo sapiens
gcaaatttttwaaaaattttc

SEQ ID NO: 5712 - DNA, 21 bp, Homo sapiens
atcctacttaygtttgagttg

SEQ ID NO: 5713 - DNA, 21 bp, Homo sapiens
tctttctgccrtttatgtatc

SEQ ID NO: 5714 - DNA, 21 bp, Homo sapiens
gttttatattkaccttaatta

SEQ ID NO: 5715 - DNA, 21 bp, Homo sapiens
tattacttcckaggagaggtt

SEQ ID NO: 5716 - DNA, 21 bp, Homo sapiens
gcggggctgtygttccatttc

SEQ ID NO: 5717 - DNA, 21 bp, Homo sapiens
gattaatgacwaaaaatactt

SEQ ID NO: 5718 - DNA, 21 bp, Homo sapiens
ccctctaatgyagaggggtgg

SEQ ID NO: 5719 - DNA, 21 bp, Homo sapiens
tttaagtattrtcagtgatta

SEQ ID NO: 5720 - DNA, 21 bp, Homo sapiens
aaaacaagagrctaataattt

SEQ ID NO: 5721 - DNA, 21 bp, Homo sapiens
tcattgcgatygtcagaaagt

SEQ ID NO: 5722 - DNA, 21 bp, Homo sapiens
gtaggatttawacttcatttt

SEQ ID NO: 5723 - DNA, 21 bp, Homo sapiens
ttgattgattsattcattcat

SEQ ID NO: 5724 - DNA, 21 bp, Homo sapiens
gtgaccttgayaaaaggaatt

SEQ ID NO: 5725 - DNA, 21 bp, Homo sapiens
tttataaataytatgttgatc

SEQ ID NO: 5726 - DNA, 21 bp, Homo sapiens
taaaaaagctyagtagacaat

SEQ ID NO: 5727 - DNA, 21 bp, Homo sapiens
ggaatttgccrccaaaataaa

SEQ ID NO: 5728 - DNA, 21 bp, Homo sapiens
atgtgatgtgycattcaagat

SEQ ID NO: 5729 - DNA, 21 bp, Homo sapiens
gtgctactcaygggaatctgg

SEQ ID NO: 5730 - DNA, 21 bp, Homo sapiens
tttggaactgycttttctttc

SEQ ID NO: 5731 - DNA, 21 bp, Homo sapiens
tccttacatgyggaatcaatg

SEQ ID NO: 5732 - DNA, 21 bp, Homo sapiens
cattttagcartatttccttc

SEQ ID NO: 5733 - DNA, 21 bp, Homo sapiens
tctaagcagartttgtatgtg

SEQ ID NO: 5734 - DNA, 21 bp, Homo sapiens
accacaaaatrgttgtgaaat

SEQ ID NO: 5735 - DNA, 21 bp, Homo sapiens
tttgcctattractgccactg

SEQ ID NO: 5736 - DNA, 21 bp, Homo sapiens
tatttctgttycattctcctg

SEQ ID NO: 5737 - DNA, 21 bp, Homo sapiens
cactacccacrtgttcagaga

SEQ ID NO: 5738 - DNA, 21 bp, Homo sapiens
agtaattgacmaagccaagag

SEQ ID NO: 5739 - DNA, 21 bp, Homo sapiens
tataacaaackgacaggaagc

SEQ ID NO: 5740 - DNA, 21 bp, Homo sapiens
caattctctayatcaacttaa

SEQ ID NO: 5741 - DNA, 21 bp, Homo sapiens
aacatctgaaytgtgtgaaag

SEQ ID NO: 5742 - DNA, 21 bp, Homo sapiens
acagtaaatgkcccactagga

SEQ ID NO: 5743 - DNA, 21 bp, Homo sapiens
cacaacatttraaatagaaaa

SEQ ID NO: 5744 - DNA, 21 bp, Homo sapiens
atctagttaaragaagttttg

SEQ ID NO: 5745 - DNA, 21 bp, Homo sapiens
tatccattttrttggtggtgg

SEQ ID NO: 5746 - DNA, 21 bp, Homo sapiens
ttttctgatgmatttacatag

SEQ ID NO: 5747 - DNA, 21 bp, Homo sapiens
tcttacagaargtcctgcagg

SEQ ID NO: 5748 - DNA, 21 bp, Homo sapiens
tggaagtattmttttattctt

SEQ ID NO: 5749 - DNA, 21 bp, Homo sapiens
ggggcattttrgaggtactta

SEQ ID NO: 5750 - DNA, 21 bp, Homo sapiens
agcagggggcrtgtttcagcc

SEQ ID NO: 5751 - DNA, 21 bp, Homo sapiens
tttttacaaaytggaagtgag

SEQ ID NO: 5752 - DNA, 21 bp, Homo sapiens
gcaaacaatgytcagcaaagc

SEQ ID NO: 5753 - DNA, 21 bp, Homo sapiens
aaaataacaayggaaaagaaa

SEQ ID NO: 5754 - DNA, 21 bp, Homo sapiens
gcagtgaaaamttcagaagtc

SEQ ID NO: 5755 - DNA, 21 bp, Homo sapiens
attcaatactrttttattggt

SEQ ID NO: 5756 - DNA, 21 bp, Homo sapiens
tcatgtgtatycttctcgtcc

SEQ ID NO: 5757 - DNA, 21 bp, Homo sapiens
ttttctctctktttttttttt

SEQ ID NO: 5758 - DNA, 21 bp, Homo sapiens
agagaaagacratggggtcgg

SEQ ID NO: 5759 - DNA, 21 bp, Homo sapiens
aggaaaaactrtagtgggtaa

SEQ ID NO: 5760 - DNA, 21 bp, Homo sapiens
gtggcaagagstgtaattaga

SEQ ID NO: 5761 - DNA, 21 bp, Homo sapiens
agcagacttgytctaaaagag

SEQ ID NO: 5762 - DNA, 21 bp, Homo sapiens
aaagaatgaaktatgatgttg

SEQ ID NO: 5763 - DNA, 21 bp, Homo sapiens
gaattagtttrctcaataaat

SEQ ID NO: 5764 - DNA, 21 bp, Homo sapiens
ccgctcaatcsttagctcaac

SEQ ID NO: 5765 - DNA, 21 bp, Homo sapiens
aatttgttctrtatttacttt

SEQ ID NO: 5766 - DNA, 21 bp, Homo sapiens
atagatttttsgttagttttt

SEQ ID NO: 5767 - DNA, 21 bp, Homo sapiens
tttgcatcttyagatttctct

SEQ ID NO: 5768 - DNA, 21 bp, Homo sapiens
tatgctttttwctgtattaca

SEQ ID NO: 5769 - DNA, 21 bp, Homo sapiens
gtagtgatacyctaatgaaac

SEQ ID NO: 5770 - DNA, 21 bp, Homo sapiens
tttagtcagaracaagttagt

SEQ ID NO: 5771 - DNA, 21 bp, Homo sapiens
gcattctagaygtctaaattt

SEQ ID NO: 5772 - DNA, 21 bp, Homo sapiens
tcttatattascccgtatcag

SEQ ID NO: 5773 - DNA, 21 bp, Homo sapiens
ttttaaaaatrtctttgaatt

SEQ ID NO: 5774 - DNA, 21 bp, Homo sapiens
tttatcattawatactggcct

SEQ ID NO: 5775 - DNA, 21 bp, Homo sapiens
gattgcagcargagagtcggg

SEQ ID NO: 5776 - DNA, 21 bp, Homo sapiens
ctttttgtatragtcatttga

SEQ ID NO: 5777 - DNA, 21 bp, Homo sapiens
aaattacttaygtttagtgct

SEQ ID NO: 5778 - DNA, 21 bp, Homo sapiens
taggatcccaragttcagtca

SEQ ID NO: 5779 - DNA, 21 bp, Homo sapiens
tctgtagtttragaatggaaa

SEQ ID NO: 5780 - DNA, 21 bp, Homo sapiens
aaatttctagratgttctgta

SEQ ID NO: 5781 - DNA, 21 bp, Homo sapiens
ttcaggtcctyggcttatttc

SEQ ID NO: 5782 - DNA, 21 bp, Homo sapiens
cactgatgccwaaatgttata

SEQ ID NO: 5783 - DNA, 21 bp, Homo sapiens
atactgatgtrttgaaaaaat

SEQ ID NO: 5784 - DNA, 21 bp, Homo sapiens
aagagatcatygggttgtatc

SEQ ID NO: 5785 - DNA, 21 bp, Homo sapiens
ccctttctcartaacttatag

SEQ ID NO: 5786 - DNA, 21 bp, Homo sapiens
ttttggcaaayggccaacaat

SEQ ID NO: 5787 - DNA, 21 bp, Homo sapiens
ggcaataggcrtctagataaa

SEQ ID NO: 5788 - DNA, 21 bp, Homo sapiens
gtaaaaaaaamaaaaaggata

SEQ ID NO: 5789 - DNA, 21 bp, Homo sapiens
ttacttgccckgatctagtcc

SEQ ID NO: 5790 - DNA, 21 bp, Homo sapiens
atctaaacagscactagaggg

SEQ ID NO: 5791 - DNA, 21 bp, Homo sapiens
tcacatctccyctctcctcaa

SEQ ID NO: 5792 - DNA, 21 bp, Homo sapiens
cttcccccccmggcccactgc

SEQ ID NO: 5793 - DNA, 21 bp, Homo sapiens
gtctttccagmacagcaatcc

SEQ ID NO: 5794 - DNA, 21 bp, Homo sapiens
aattattgagrttttgttttt

SEQ ID NO: 5795 - DNA, 21 bp, Homo sapiens
taaagtctccyagcgaagaaa

SEQ ID NO: 5796 - DNA, 21 bp, Homo sapiens
ttgtggttcawctttaaaaac

SEQ ID NO: 5797 - DNA, 21 bp, Homo sapiens
gtagaagtgtyaaagaattta

SEQ ID NO: 5798 - DNA, 21 bp, Homo sapiens
ccagtaccttraacatcacag

SEQ ID NO: 5799 - DNA, 21 bp, Homo sapiens
taacctttatkttctgaggcc

SEQ ID NO: 5800 - DNA, 21 bp, Homo sapiens
gaacttgtagwttatatatct

SEQ ID NO: 5801 - DNA, 21 bp, Homo sapiens
tcttctggaascacggtatca

SEQ ID NO: 5802 - DNA, 21 bp, Homo sapiens
ataagtggtaytacaaatatc

SEQ ID NO: 5803 - DNA, 21 bp, Homo sapiens
actgaagtacyttaggaccct

SEQ ID NO: 5804 - DNA, 21 bp, Homo sapiens
aattttgcgamaattatcaag

SEQ ID NO: 5805 - DNA, 21 bp, Homo sapiens
ttaatcatgcwttctacagtg

SEQ ID NO: 5806 - DNA, 21 bp, Homo sapiens
gtaacatggasgtggaaatat

SEQ ID NO: 5807 - DNA, 21 bp, Homo sapiens
aagagatttgytattcacctc

SEQ ID NO: 5808 - DNA, 21 bp, Homo sapiens
ccatttggatrgctatttctt

SEQ ID NO: 5809 - DNA, 21 bp, Homo sapiens
tggaaagaagyaaaaacagtt

SEQ ID NO: 5810 - DNA, 21 bp, Homo sapiens
ttaaaaaattyttaacataca

SEQ ID NO: 5811 - DNA, 21 bp, Homo sapiens
agttttggcayaagtccatgg

SEQ ID NO: 5812 - DNA, 21 bp, Homo sapiens
aatttgatatrcagaacttag

SEQ ID NO: 5813 - DNA, 21 bp, Homo sapiens
ccaaatacctrttgaaatttc

SEQ ID NO: 5814 - DNA, 21 bp, Homo sapiens
attataccaayttgtagttga

SEQ ID NO: 5815 - DNA, 21 bp, Homo sapiens
agcttttcttyttccacttca

SEQ ID NO: 5816 - DNA, 21 bp, Homo sapiens
ttgaaaaatgwttgtatcaaa

SEQ ID NO: 5817 - DNA, 21 bp, Homo sapiens
aggatgaagawgatgatgatg

SEQ ID NO: 5818 - DNA, 21 bp, Homo sapiens
tatggtagtgwttataggaat

SEQ ID NO: 5819 - DNA, 21 bp, Homo sapiens
tcagtaagtawttttccatcc

SEQ ID NO: 5820 - DNA, 21 bp, Homo sapiens
gaaaaaatgcraattttaagt

SEQ ID NO: 5821 - DNA, 21 bp, Homo sapiens
gggaaactgcragtttaagaa

SEQ ID NO: 5822 - DNA, 21 bp, Homo sapiens
gcactcacacrgcacacacac

SEQ ID NO: 5823 - DNA, 21 bp, Homo sapiens
tttgcacttgmaattacaagt

SEQ ID NO: 5824 - DNA, 21 bp, Homo sapiens
tgtccagggawaagtaagcat

SEQ ID NO: 5825 - DNA, 21 bp, Homo sapiens
gtagtcaaccyatactacacg

SEQ ID NO: 5826 - DNA, 21 bp, Homo sapiens
tggttctcagrtggcatctct

SEQ ID NO: 5827 - DNA, 21 bp, Homo sapiens
atactgtggtwtgtgaaaatg

SEQ ID NO: 5828 - DNA, 21 bp, Homo sapiens
ttcaaaatacrcacctgaatg

SEQ ID NO: 5829 - DNA, 21 bp, Homo sapiens
gctgtcccacmctttttctga

SEQ ID NO: 5830 - DNA, 21 bp, Homo sapiens
ttcacaatgtkgagcagagcc

SEQ ID NO: 5831 - DNA, 21 bp, Homo sapiens
gagcttgtttwtgtatttttt

SEQ ID NO: 5832 - DNA, 21 bp, Homo sapiens
acgtaaaaatytaatggttat

SEQ ID NO: 5833 - DNA, 21 bp, Homo sapiens
ttcaggattcrggatttcctg

SEQ ID NO: 5834 - DNA, 21 bp, Homo sapiens
gctcagggtgragcccattaa

SEQ ID NO: 5835 - DNA, 21 bp, Homo sapiens
aagattaaaakagacaaacaa

SEQ ID NO: 5836 - DNA, 21 bp, Homo sapiens
catcctgctgmcctttgaaga

SEQ ID NO: 5837 - DNA, 21 bp, Homo sapiens
actattttgaytacaccaagt

SEQ ID NO: 5838 - DNA, 21 bp, Homo sapiens
aatttcatgtrctcatgacat

SEQ ID NO: 5839 - DNA, 21 bp, Homo sapiens
ttctttcatgyagcacaatgt

SEQ ID NO: 5840 - DNA, 21 bp, Homo sapiens
tacaaacatawgtctacacag

SEQ ID NO: 5841 - DNA, 21 bp, Homo sapiens
gcaaagtcagsgctgagccca

SEQ ID NO: 5842 - DNA, 21 bp, Homo sapiens
cacagaagatratgaaactgt

SEQ ID NO: 5843 - DNA, 21 bp, Homo sapiens
agggtcaatgyaattcaatag

SEQ ID NO: 5844 - DNA, 21 bp, Homo sapiens
gtggattctayccacaggcag

SEQ ID NO: 5845 - DNA, 21 bp, Homo sapiens
ttattcagtgracatatttat

SEQ ID NO: 5846 - DNA, 21 bp, Homo sapiens
agtgatagcawcatttactac

SEQ ID NO: 5847 - DNA, 21 bp, Homo sapiens
aaagagaaccrgcctagaggt

SEQ ID NO: 5848 - DNA, 21 bp, Homo sapiens
gaaattaatayaaattttgaa

SEQ ID NO: 5849 - DNA, 21 bp, Homo sapiens
gaaaatagaamaatatcattc

SEQ ID NO: 5850 - DNA, 21 bp, Homo sapiens
gtgttaggtgwcataaataaa

SEQ ID NO: 5851 - DNA, 21 bp, Homo sapiens
cactgcatggyacaaagttaa

SEQ ID NO: 5852 - DNA, 21 bp, Homo sapiens
cgcacatttcyctctccctgc

SEQ ID NO: 5853 - DNA, 21 bp, Homo sapiens
tagaatacttytaaaaagtaa

SEQ ID NO: 5854 - DNA, 21 bp, Homo sapiens
gttttacagtrtatcctctgt

SEQ ID NO: 5855 - DNA, 21 bp, Homo sapiens
aacacaatatktgtattctga

SEQ ID NO: 5856 - DNA, 21 bp, Homo sapiens
ggacgaatatygtacaactcc

SEQ ID NO: 5857 - DNA, 21 bp, Homo sapiens
gatttattaaycctctagtgg

SEQ ID NO: 5858 - DNA, 21 bp, Homo sapiens
atagacgtgcstagcctgaga

SEQ ID NO: 5859 - DNA, 21 bp, Homo sapiens
cacttaccatrttagttcgtt

SEQ ID NO: 5860 - DNA, 21 bp, Homo sapiens
gtaggtagcasggataactat

SEQ ID NO: 5861 - DNA, 21 bp, Homo sapiens
tttttactacwtttaatagca

SEQ ID NO: 5862 - DNA, 21 bp, Homo sapiens
tccagacataygtatttagtt

SEQ ID NO: 5863 - DNA, 21 bp, Homo sapiens
aaccattttawcaactgaact

SEQ ID NO: 5864 - DNA, 21 bp, Homo sapiens
acattaacaaytaaacattgt

SEQ ID NO: 5865 - DNA, 21 bp, Homo sapiens
ttttgtccagytaaataattc

SEQ ID NO: 5866 - DNA, 21 bp, Homo sapiens
tacagagtgaraaagtaaata

SEQ ID NO: 5867 - DNA, 21 bp, Homo sapiens
tatgaaaagtrgaattttgta

SEQ ID NO: 5868 - DNA, 21 bp, Homo sapiens
tggtttgaggwtgggaataaa

SEQ ID NO: 5869 - DNA, 21 bp, Homo sapiens
acggtgactcratacattcaa

SEQ ID NO: 5870 - DNA, 21 bp, Homo sapiens
tacttttcacsttactacttg

SEQ ID NO: 5871 - DNA, 21 bp, Homo sapiens
tagaaatcacktatgagtttt

SEQ ID NO: 5872 - DNA, 21 bp, Homo sapiens
gaaaaatgaaragagtgaacg

SEQ ID NO: 5873 - DNA, 21 bp, Homo sapiens
ccaaggaaacraactccctgg

SEQ ID NO: 5874 - DNA, 21 bp, Homo sapiens
taaattatacktattggtctg

SEQ ID NO: 5875 - DNA, 21 bp, Homo sapiens
taggatatgtmaaaaaaaaaa

SEQ ID NO: 5876 - DNA, 21 bp, Homo sapiens
tctgaggtgtrcactgcagta

SEQ ID NO: 5877 - DNA, 21 bp, Homo sapiens
gtgtgcagttwaagttagtga

SEQ ID NO: 5878 - DNA, 21 bp, Homo sapiens
tacatgtcaarttaggtttta

SEQ ID NO: 5879 - DNA, 21 bp, Homo sapiens
ttgggacattkgaaaaacata

SEQ ID NO: 5880 - DNA, 21 bp, Homo sapiens
aaaggaactcmacaaaggaaa

SEQ ID NO: 5881 - DNA, 21 bp, Homo sapiens
ctttgagtgaygcccttaaat

SEQ ID NO: 5882 - DNA, 21 bp, Homo sapiens
ttaaaaagatrtgactctact

SEQ ID NO: 5883 - DNA, 21 bp, Homo sapiens
aattctcttcsaagagtccca

SEQ ID NO: 5884 - DNA, 21 bp, Homo sapiens
agagagtgaargagttgtgta

SEQ ID NO: 5885 - DNA, 21 bp, Homo sapiens
ttgcatgtctrgcgtgattga

SEQ ID NO: 5886 - DNA, 21 bp, Homo sapiens
accaaaagatyggggaattgg

SEQ ID NO: 5887 - DNA, 21 bp, Homo sapiens
tatattccaarttttgtacaa

SEQ ID NO: 5888 - DNA, 21 bp, Homo sapiens
tggtaagtttktacataaacc

SEQ ID NO: 5889 - DNA, 21 bp, Homo sapiens
gtttgttctgycattaaatat

SEQ ID NO: 5890 - DNA, 21 bp, Homo sapiens
ttgtaagaaaratccgtttac

SEQ ID NO: 5891 - DNA, 21 bp, Homo sapiens
tgtcaaagtgkctgaaagcag

SEQ ID NO: 5892 - DNA, 21 bp, Homo sapiens
ttggttctccwtgaatcacta

SEQ ID NO: 5893 - DNA, 21 bp, Homo sapiens
ttttctccgcmtgacaacagg

SEQ ID NO: 5894 - DNA, 21 bp, Homo sapiens
gaacctgcggyctttcaggct

SEQ ID NO: 5895 - DNA, 21 bp, Homo sapiens
atgctctataygtctggaaac

SEQ ID NO: 5896 - DNA, 21 bp, Homo sapiens
taggcaaagaycttgcgcacg

SEQ ID NO: 5897 - DNA, 21 bp, Homo sapiens
aagcctgtttyggggagccct

SEQ ID NO: 5898 - DNA, 21 bp, Homo sapiens
acctggcgccycattctgctt

SEQ ID NO: 5899 - DNA, 21 bp, Homo sapiens
tcatgaagacyaccagttttt

SEQ ID NO: 5900 - DNA, 21 bp, Homo sapiens
ggcgtgctgcstgtacaaagt

SEQ ID NO: 5901 - DNA, 21 bp, Homo sapiens
aagttgcccartgtggagccg

SEQ ID NO: 5902 - DNA, 21 bp, Homo sapiens
gggagctaatygttcactgcc

SEQ ID NO: 5903 - DNA, 21 bp, Homo sapiens
atttttctggmacattccaac

SEQ ID NO: 5904 - DNA, 21 bp, Homo sapiens
acatagaaatkccacttctta

SEQ ID NO: 5905 - DNA, 21 bp, Homo sapiens
ttcccagcggrgagcttcctc

SEQ ID NO: 5906 - DNA, 21 bp, Homo sapiens
ttgctctttcyccctgtagac

SEQ ID NO: 5907 - DNA, 21 bp, Homo sapiens
ggaaatttgartagtcctttt

SEQ ID NO: 5908 - DNA, 21 bp, Homo sapiens
ctgtaccaagytggtccaatc

SEQ ID NO: 5909 - DNA, 21 bp, Homo sapiens
catgactggcrggggagatgg

SEQ ID NO: 5910 - DNA, 21 bp, Homo sapiens
ctgtgatgacytgagacctgc

SEQ ID NO: 5911 - DNA, 21 bp, Homo sapiens
caaatggtcgytttagtgcca

SEQ ID NO: 5912 - DNA, 21 bp, Homo sapiens
tgggttaaaakaaacaatgca

SEQ ID NO: 5913 - DNA, 21 bp, Homo sapiens
tcccaatcccrtctctgcttc

SEQ ID NO: 5914 - DNA, 21 bp, Homo sapiens
tgcccacaccrgggtactcca

SEQ ID NO: 5915 - DNA, 21 bp, Homo sapiens
acattcaacaygcatggactt

SEQ ID NO: 5916 - DNA, 21 bp, Homo sapiens
atcaatggaarctcacccttt

SEQ ID NO: 5917 - DNA, 21 bp, Homo sapiens
gtggttctgtytgcttgtcac

SEQ ID NO: 5918 - DNA, 21 bp, Homo sapiens
agcaaataacrattccttcaa

SEQ ID NO: 5919 - DNA, 21 bp, Homo sapiens
catctggaacrtaatactgcc

SEQ ID NO: 5920 - DNA, 21 bp, Homo sapiens
ctaaagccacmcatccctatc

SEQ ID NO: 5921 - DNA, 21 bp, Homo sapiens
tctgtaacagyagcaaatctg

SEQ ID NO: 5922 - DNA, 21 bp, Homo sapiens
agcttttcccrgtacagtcac

SEQ ID NO: 5923 - DNA, 21 bp, Homo sapiens
tctggcctagyactttatagt

SEQ ID NO: 5924 - DNA, 21 bp, Homo sapiens
ctgttgggcargctgagctta

SEQ ID NO: 5925 - DNA, 21 bp, Homo sapiens
aggttaggtgygggaacctct

SEQ ID NO: 5926 - DNA, 21 bp, Homo sapiens
gtgagaagtcmcttctctctg

SEQ ID NO: 5927 - DNA, 21 bp, Homo sapiens
atttgcattcrgcaaaagtca

SEQ ID NO: 5928 - DNA, 21 bp, Homo sapiens
agtttctctgrggtcatctgc

SEQ ID NO: 5929 - DNA, 21 bp, Homo sapiens
ataaacgtaarctagaaggaa

SEQ ID NO: 5930 - DNA, 21 bp, Homo sapiens
aggtttctatygtggggacaa

SEQ ID NO: 5931 - DNA, 21 bp, Homo sapiens
accgagaaacyggtccccttt

SEQ ID NO: 5932 - DNA, 21 bp, Homo sapiens
gaggaaatggyagaactctgg

SEQ ID NO: 5933 - DNA, 21 bp, Homo sapiens
tggtggcaaamtgtgacctga

SEQ ID NO: 5934 - DNA, 21 bp, Homo sapiens
tttcaaggggraaaaaaaaaa

SEQ ID NO: 5935 - DNA, 21 bp, Homo sapiens
tttataagaawgattcttgtg

SEQ ID NO: 5936 - DNA, 21 bp, Homo sapiens
ggatggtcttyaacgaggttt

SEQ ID NO: 5937 - DNA, 21 bp, Homo sapiens
acagttatcawagatgccagt

SEQ ID NO: 5938 - DNA, 21 bp, Homo sapiens
cccctcctggmaggcacgctg

SEQ ID NO: 5939 - DNA, 21 bp, Homo sapiens
ctaagcgcagygttcggggca

SEQ ID NO: 5940 - DNA, 21 bp, Homo sapiens
ttccagagacraaaaagaggg

SEQ ID NO: 5941 - DNA, 21 bp, Homo sapiens
tcccgtctatstcccttactg

SEQ ID NO: 5942 - DNA, 21 bp, Homo sapiens
tcttttttttwaaaaaaaaat

SEQ ID NO: 5943 - DNA, 21 bp, Homo sapiens
aaacataaacrgtgagaagca

SEQ ID NO: 5944 - DNA, 21 bp, Homo sapiens
aagggctgccrctgggttaga

SEQ ID NO: 5945 - DNA, 21 bp, Homo sapiens
agctcccatcrtagtgctctc

SEQ ID NO: 5946 - DNA, 21 bp, Homo sapiens
atgtgtatccrtgaaatcgcc

SEQ ID NO: 5947 - DNA, 21 bp, Homo sapiens
catatcttatrtaattgctaa

SEQ ID NO: 5948 - DNA, 21 bp, Homo sapiens
tgaggaagagrtagtgttata

SEQ ID NO: 5949 - DNA, 21 bp, Homo sapiens
gattgtttatrtggatggtaa

SEQ ID NO: 5950 - DNA, 21 bp, Homo sapiens
agatgatccartgatccattc

SEQ ID NO: 5951 - DNA, 21 bp, Homo sapiens
gtatcatagaygacattaatc

SEQ ID NO: 5952 - DNA, 21 bp, Homo sapiens
tggtgattttwaaaaaaaaaa

SEQ ID NO: 5953 - DNA, 21 bp, Homo sapiens
tctaactggtratcattaatg

SEQ ID NO: 5954 - DNA, 21 bp, Homo sapiens
tagatgccttsataacagact

SEQ ID NO: 5955 - DNA, 21 bp, Homo sapiens
agtgactgttwctttcctctg

SEQ ID NO: 5956 - DNA, 21 bp, Homo sapiens
aactacttttwcaaagggggg

SEQ ID NO: 5957 - DNA, 21 bp, Homo sapiens
atctgggattkttaaccattt

SEQ ID NO: 5958 - DNA, 21 bp, Homo sapiens
gctggcattcrtgatttggtt

SEQ ID NO: 5959 - DNA, 21 bp, Homo sapiens
aaacgctgccrcatatcaagt

SEQ ID NO: 5960 - DNA, 21 bp, Homo sapiens
cctaaggggtrtatcagtagg

SEQ ID NO: 5961 - DNA, 21 bp, Homo sapiens
ggtaaatcaarccctgctaat

SEQ ID NO: 5962 - DNA, 21 bp, Homo sapiens
tagggttaccwtctcagtggt

SEQ ID NO: 5963 - DNA, 21 bp, Homo sapiens
gcctcaacaartggaaataca

SEQ ID NO: 5964 - DNA, 21 bp, Homo sapiens
ccttaaatctrtagcccctga

SEQ ID NO: 5965 - DNA, 21 bp, Homo sapiens
cttgaagctgkgcacactcag

SEQ ID NO: 5966 - DNA, 21 bp, Homo sapiens
cagtagatgcmgaaaaaaaat

SEQ ID NO: 5967 - DNA, 21 bp, Homo sapiens
cattagggttwtatcatttgc

SEQ ID NO: 5968 - DNA, 21 bp, Homo sapiens
gccagttctcsgcagtgaaat

SEQ ID NO: 5969 - DNA, 21 bp, Homo sapiens
ctgctccattkgcaaggaata

SEQ ID NO: 5970 - DNA, 21 bp, Homo sapiens
aaaaaggtctsattgcaagac

SEQ ID NO: 5971 - DNA, 21 bp, Homo sapiens
aagaggtagcrctgatcgtta

SEQ ID NO: 5972 - DNA, 21 bp, Homo sapiens
atatttgtatyacactggtca

SEQ ID NO: 5973 - DNA, 21 bp, Homo sapiens
ctaaatctctrtcttcagacc

SEQ ID NO: 5974 - DNA, 21 bp, Homo sapiens
gtctaagaatkcatggtggtg

SEQ ID NO: 5975 - DNA, 21 bp, Homo sapiens
aagtagacaayaaaaattgaa

SEQ ID NO: 5976 - DNA, 21 bp, Homo sapiens
atgattttcasctttgtcaca

SEQ ID NO: 5977 - DNA, 21 bp, Homo sapiens
ctaggtttttytgaagaattg

SEQ ID NO: 5978 - DNA, 21 bp, Homo sapiens
ctcacctgcasttgagaaact

SEQ ID NO: 5979 - DNA, 21 bp, Homo sapiens
gagttcactcraagttctcac

SEQ ID NO: 5980 - DNA, 21 bp, Homo sapiens
gacattcatgktgaacattta

SEQ ID NO: 5981 - DNA, 21 bp, Homo sapiens
attcttctctytcttctcctg

SEQ ID NO: 5982 - DNA, 21 bp, Homo sapiens
tcatgcattcrtaaattgtgg

SEQ ID NO: 5983 - DNA, 21 bp, Homo sapiens
tgagattcagrcccaggtcta

SEQ ID NO: 5984 - DNA, 21 bp, Homo sapiens
gttactcacawgatcactaaa

SEQ ID NO: 5985 - DNA, 21 bp, Homo sapiens
cttttccaatraacttttatt

SEQ ID NO: 5986 - DNA, 21 bp, Homo sapiens
ctcatacccaratagtagatt

SEQ ID NO: 5987 - DNA, 21 bp, Homo sapiens
ttttcaaactmaaaatgttct

SEQ ID NO: 5988 - DNA, 21 bp, Homo sapiens
gctcaaaaccrattagcacag

SEQ ID NO: 5989 - DNA, 21 bp, Homo sapiens
tgttccccaamtcaccatttt

SEQ ID NO: 5990 - DNA, 21 bp, Homo sapiens
gattttgaaaytttaccagat

SEQ ID NO: 5991 - DNA, 21 bp, Homo sapiens
ttaactccacraaactattcc

SEQ ID NO: 5992 - DNA, 21 bp, Homo sapiens
tctttgcaacyctccttagca

SEQ ID NO: 5993 - DNA, 21 bp, Homo sapiens
caaatacacamaaaaaaactg

SEQ ID NO: 5994 - DNA, 21 bp, Homo sapiens
cagtcttagtrttcaaccctt

SEQ ID NO: 5995 - DNA, 21 bp, Homo sapiens
ctcttcccctwtgagccataa

SEQ ID NO: 5996 - DNA, 21 bp, Homo sapiens
tcttaacttgyacgtgttacc

SEQ ID NO: 5997 - DNA, 21 bp, Homo sapiens
gagttggaatsctggaagttt

SEQ ID NO: 5998 - DNA, 21 bp, Homo sapiens
tgattagaagrttcttcaaaa

SEQ ID NO: 5999 - DNA, 21 bp, Homo sapiens
aagatgctaaraaaggggtca

SEQ ID NO: 6000 - DNA, 21 bp, Homo sapiens
tcaacacagasgggagaactg

SEQ ID NO: 6001 - DNA, 21 bp, Homo sapiens
agataatagtrttcagaggaa

SEQ ID NO: 6002 - DNA, 21 bp, Homo sapiens
tttctgtaccstaagagagtg

SEQ ID NO: 6003 - DNA, 21 bp, Homo sapiens
ttggcttcaayccacagatgg

SEQ ID NO: 6004 - DNA, 21 bp, Homo sapiens
aatatataatyattcggaaaa

SEQ ID NO: 6005 - DNA, 21 bp, Homo sapiens
acaatccaagmatggatacct

SEQ ID NO: 6006 - DNA, 21 bp, Homo sapiens
gagacaaaatrccaagttaag

SEQ ID NO: 6007 - DNA, 21 bp, Homo sapiens
cttgaaatgaygtcttccaaa

SEQ ID NO: 6008 - DNA, 21 bp, Homo sapiens
tttgaagcccyccatgtgcag

SEQ ID NO: 6009 - DNA, 21 bp, Homo sapiens
gcaagacttamaaaaattttt

SEQ ID NO: 6010 - DNA, 21 bp, Homo sapiens
tccacaggtcrgtctataagc

SEQ ID NO: 6011 - DNA, 21 bp, Homo sapiens
taaatgaaggrgtttttttgt

SEQ ID NO: 6012 - DNA, 21 bp, Homo sapiens
tgtcaagttcsagaattaaag

SEQ ID NO: 6013 - DNA, 21 bp, Homo sapiens
gaaattccaayccatttgtct

SEQ ID NO: 6014 - DNA, 21 bp, Homo sapiens
atttattattwaaaggtgtta

SEQ ID NO: 6015 - DNA, 21 bp, Homo sapiens
aggtggaatgrccaatttaaa

SEQ ID NO: 6016 - DNA, 21 bp, Homo sapiens
ttaatgaacgraagattgcca

SEQ ID NO: 6017 - DNA, 21 bp, Homo sapiens
ggaaatgggtytatgagtaac

SEQ ID NO: 6018 - DNA, 21 bp, Homo sapiens
tgagataaacrctatgtcaac

SEQ ID NO: 6019 - DNA, 21 bp, Homo sapiens
tttcatcttcrccacaccact

SEQ ID NO: 6020 - DNA, 21 bp, Homo sapiens
cagatctgatrtaatcctaat

SEQ ID NO: 6021 - DNA, 21 bp, Homo sapiens
actgacggaaragaatagggt

SEQ ID NO: 6022 - DNA, 21 bp, Homo sapiens
agagtgaatcraatattttac

SEQ ID NO: 6023 - DNA, 21 bp, Homo sapiens
taagtaaaaayttcccagttt

SEQ ID NO: 6024 - DNA, 21 bp, Homo sapiens
aagcatttaaraaacatattt

SEQ ID NO: 6025 - DNA, 21 bp, Homo sapiens
ctgcaaaataytttctcctta

SEQ ID NO: 6026 - DNA, 21 bp, Homo sapiens
tatattatttsacagtggtta

SEQ ID NO: 6027 - DNA, 21 bp, Homo sapiens
tttaaacaacratttgtagtc

SEQ ID NO: 6028 - DNA, 21 bp, Homo sapiens
gtttctctagygatctgcata

SEQ ID NO: 6029 - DNA, 21 bp, Homo sapiens
atataacagargcaacctgac

SEQ ID NO: 6030 - DNA, 21 bp, Homo sapiens
aaagaaaggtsgaggaaagtt

SEQ ID NO: 6031 - DNA, 21 bp, Homo sapiens
cagtggctcaygcctataatc

SEQ ID NO: 6032 - DNA, 21 bp, Homo sapiens
aacttattttkggagcaatga

SEQ ID NO: 6033 - DNA, 21 bp, Homo sapiens
tttgaaacagraattaaattg

SEQ ID NO: 6034 - DNA, 21 bp, Homo sapiens
ttctggtaatsatgcctgatg

SEQ ID NO: 6035 - DNA, 21 bp, Homo sapiens
taactcaattwaaaaaaaaac

SEQ ID NO: 6036 - DNA, 21 bp, Homo sapiens
aaataacattyattaaaggtg

SEQ ID NO: 6037 - DNA, 21 bp, Homo sapiens
caggaaaacawtataaactaa

SEQ ID NO: 6038 - DNA, 21 bp, Homo sapiens
aggtcagtgcygaaaagaaca

SEQ ID NO: 6039 - DNA, 21 bp, Homo sapiens
catcaaatacrtttttgctct

SEQ ID NO: 6040 - DNA, 21 bp, Homo sapiens
ggcatttcaasgctgacatta

SEQ ID NO: 6041 - DNA, 21 bp, Homo sapiens
cagctgccttsctggtgtgtt

SEQ ID NO: 6042 - DNA, 21 bp, Homo sapiens
ttgggccaagyttaaatcagc

SEQ ID NO: 6043 - DNA, 21 bp, Homo sapiens
aaggcaattcrcactgaccaa

SEQ ID NO: 6044 - DNA, 21 bp, Homo sapiens
ttattctagcyttttatttag

SEQ ID NO: 6045 - DNA, 21 bp, Homo sapiens
gttctctttcraataggatcc

SEQ ID NO: 6046 - DNA, 21 bp, Homo sapiens
cctacaggagragaaaacaaa

SEQ ID NO: 6047 - DNA, 21 bp, Homo sapiens
aatgtgtaggyttttaaaata

SEQ ID NO: 6048 - DNA, 21 bp, Homo sapiens
atgtcgtgggrcttctcagcc

SEQ ID NO: 6049 - DNA, 21 bp, Homo sapiens
tttccacatgrccaaaacaac

SEQ ID NO: 6050 - DNA, 21 bp, Homo sapiens
agggaattgcrgagttaagag

SEQ ID NO: 6051 - DNA, 21 bp, Homo sapiens
agagccagttytgagagaaaa

SEQ ID NO: 6052 - DNA, 21 bp, Homo sapiens
tctttccaacscattcttctc

SEQ ID NO: 6053 - DNA, 21 bp, Homo sapiens
atgtgaggaamctggagcaca

SEQ ID NO: 6054 - DNA, 21 bp, Homo sapiens
ggagggtactratctattgtc

SEQ ID NO: 6055 - DNA, 21 bp, Homo sapiens
cttacctttaygataaaaacc

SEQ ID NO: 6056 - DNA, 21 bp, Homo sapiens
attataatcaygtctcaaagc

SEQ ID NO: 6057 - DNA, 21 bp, Homo sapiens
aaatactattwaaagctagaa

SEQ ID NO: 6058 - DNA, 21 bp, Homo sapiens
tttgtctgttktttcttcatg

SEQ ID NO: 6059 - DNA, 21 bp, Homo sapiens
cttttcaatgyggtgcctaaa

SEQ ID NO: 6060 - DNA, 21 bp, Homo sapiens
tagacctgttrggcaggaagt

SEQ ID NO: 6061 - DNA, 21 bp, Homo sapiens
ttgtacatggwaaagacactt

SEQ ID NO: 6062 - DNA, 21 bp, Homo sapiens
tcacagctaargagacaagca

SEQ ID NO: 6063 - DNA, 21 bp, Homo sapiens
ctgccactacyaacatttcga

SEQ ID NO: 6064 - DNA, 21 bp, Homo sapiens
tgtactctttycttggctcat

SEQ ID NO: 6065 - DNA, 21 bp, Homo sapiens
gaaaagcctgkatattcagac

SEQ ID NO: 6066 - DNA, 21 bp, Homo sapiens
cattggggccrcctcttgccc

SEQ ID NO: 6067 - DNA, 21 bp, Homo sapiens
ctgatttgacrtctctattgg

SEQ ID NO: 6068 - DNA, 21 bp, Homo sapiens
cctactgttgrgaaaacctct

SEQ ID NO: 6069 - DNA, 21 bp, Homo sapiens
ctgtcattacygaggcttaag

SEQ ID NO: 6070 - DNA, 21 bp, Homo sapiens
tttctgcaagygggcaggaaa

SEQ ID NO: 6071 - DNA, 21 bp, Homo sapiens
agtaggcctayggtaagtact

SEQ ID NO: 6072 - DNA, 21 bp, Homo sapiens
ccttaattgtmttttatctag

SEQ ID NO: 6073 - DNA, 21 bp, Homo sapiens
ttcaaacaggmgcagaagagt

SEQ ID NO: 6074 - DNA, 21 bp, Homo sapiens
ggatttatatrttatgattaa

SEQ ID NO: 6075 - DNA, 21 bp, Homo sapiens
gaggcatgttmgttttcacga

SEQ ID NO: 6076 - DNA, 21 bp, Homo sapiens
aagtggatcasatgatctcta

SEQ ID NO: 6077 - DNA, 21 bp, Homo sapiens
atagatattartgtttacttc

SEQ ID NO: 6078 - DNA, 21 bp, Homo sapiens
agtgtcatcaraaaagtcttc

SEQ ID NO: 6079 - DNA, 21 bp, Homo sapiens
atcatgacaaktggaaacttg

SEQ ID NO: 6080 - DNA, 21 bp, Homo sapiens
agccttccccrctatcgacat

SEQ ID NO: 6081 - DNA, 21 bp, Homo sapiens
gggacatttamaaaagttttc

SEQ ID NO: 6082 - DNA, 21 bp, Homo sapiens
gagtctaattragtcacttat

SEQ ID NO: 6083 - DNA, 21 bp, Homo sapiens
cttaatagtgkattccttcat

SEQ ID NO: 6084 - DNA, 21 bp, Homo sapiens
tgtcttttgtyttgaaaaaag

SEQ ID NO: 6085 - DNA, 21 bp, Homo sapiens
tcttaactaartgcattttaa

SEQ ID NO: 6086 - DNA, 21 bp, Homo sapiens
agagaagtttrcagaactgaa

SEQ ID NO: 6087 - DNA, 21 bp, Homo sapiens
gaataattagratttgtactt

SEQ ID NO: 6088 - DNA, 21 bp, Homo sapiens
agtaattggtyaatttcacct

SEQ ID NO: 6089 - DNA, 21 bp, Homo sapiens
ttataacagtrggagagataa

SEQ ID NO: 6090 - DNA, 21 bp, Homo sapiens
acacaggtttrtaaaatacct

SEQ ID NO: 6091 - DNA, 21 bp, Homo sapiens
ttatgcattcrtcttagtgta

SEQ ID NO: 6092 - DNA, 21 bp, Homo sapiens
ttaccaggcaygtatacttag

SEQ ID NO: 6093 - DNA, 21 bp, Homo sapiens
tgtgctaagcrttcatttgat

SEQ ID NO: 6094 - DNA, 21 bp, Homo sapiens
gatggaatctkattttttttt

SEQ ID NO: 6095 - DNA, 21 bp, Homo sapiens
cagataccaayatcattttag

SEQ ID NO: 6096 - DNA, 21 bp, Homo sapiens
tacattgattrttttaatgaa

SEQ ID NO: 6097 - DNA, 21 bp, Homo sapiens
agttatctgcwgttttttttt

SEQ ID NO: 6098 - DNA, 21 bp, Homo sapiens
cctgctactcsctatacacac

SEQ ID NO: 6099 - DNA, 21 bp, Homo sapiens
cttctaaatgrcagtgatcat

SEQ ID NO: 6100 - DNA, 21 bp, Homo sapiens
ctagtatctgyaaaagcccaa

SEQ ID NO: 6101 - DNA, 21 bp, Homo sapiens
acttattttcscccccactat

SEQ ID NO: 6102 - DNA, 21 bp, Homo sapiens
ttgaggtaatraaaactttta

SEQ ID NO: 6103 - DNA, 21 bp, Homo sapiens
ttaaatttaamattatctcat

SEQ ID NO: 6104 - DNA, 21 bp, Homo sapiens
taaaatgcttkctgcttcata

SEQ ID NO: 6105 - DNA, 21 bp, Homo sapiens
ttttaaaaaartctttcataa

SEQ ID NO: 6106 - DNA, 21 bp, Homo sapiens
tggactccctrattggttggg

SEQ ID NO: 6107 - DNA, 21 bp, Homo sapiens
ttgatttagcrttagttgatt

SEQ ID NO: 6108 - DNA, 21 bp, Homo sapiens
atgagcattayggttggagtt

SEQ ID NO: 6109 - DNA, 21 bp, Homo sapiens
aataggatcaygctgagaatt

SEQ ID NO: 6110 - DNA, 21 bp, Homo sapiens
ttatttaaatrctatctttca

SEQ ID NO: 6111 - DNA, 21 bp, Homo sapiens
gtgacaaagcygagatctgag

SEQ ID NO: 6112 - DNA, 21 bp, Homo sapiens
aaatttctgcrtatgtcatta

SEQ ID NO: 6113 - DNA, 21 bp, Homo sapiens
aatatatgctyccatttcact

SEQ ID NO: 6114 - DNA, 21 bp, Homo sapiens
tcctggactcrtggtttctat

SEQ ID NO: 6115 - DNA, 21 bp, Homo sapiens
aaaataaaatrctagcaataa

SEQ ID NO: 6116 - DNA, 21 bp, Homo sapiens
taaatactttygcttctttct

SEQ ID NO: 6117 - DNA, 21 bp, Homo sapiens
agcactatgcktgattctgag

SEQ ID NO: 6118 - DNA, 21 bp, Homo sapiens
tcccgaatgtstaattcaggc

SEQ ID NO: 6119 - DNA, 21 bp, Homo sapiens
aaatttaaatmaacagatgta

SEQ ID NO: 6120 - DNA, 21 bp, Homo sapiens
attactgtcakcattttacat

SEQ ID NO: 6121 - DNA, 21 bp, Homo sapiens
gttcaacaggratattggcct

SEQ ID NO: 6122 - DNA, 21 bp, Homo sapiens
aggatgaaaarcattgctaat

SEQ ID NO: 6123 - DNA, 21 bp, Homo sapiens
tttacaaaacrtgatgggaaa

SEQ ID NO: 6124 - DNA, 21 bp, Homo sapiens
cccctgaaacsagcatgtctc

SEQ ID NO: 6125 - DNA, 21 bp, Homo sapiens
gtcttctgttyagttttggaa

SEQ ID NO: 6126 - DNA, 21 bp, Homo sapiens
tgttgctgcgrgctttcagca

SEQ ID NO: 6127 - DNA, 21 bp, Homo sapiens
aattaatgaarttcttactgt

SEQ ID NO: 6128 - DNA, 21 bp, Homo sapiens
ttaggttccayttttccagtg

SEQ ID NO: 6129 - DNA, 21 bp, Homo sapiens
tatagaaatckaacaaattgt

SEQ ID NO: 6130 - DNA, 21 bp, Homo sapiens
ttctgactgcscagtgaaaaa

SEQ ID NO: 6131 - DNA, 21 bp, Homo sapiens
ttgaaacattygatttagaaa

SEQ ID NO: 6132 - DNA, 21 bp, Homo sapiens
ctgcctggtgygaccttagct

SEQ ID NO: 6133 - DNA, 21 bp, Homo sapiens
agaagaagaamaagcttttcc

SEQ ID NO: 6134 - DNA, 21 bp, Homo sapiens
acttgccttcwctctggggtt

SEQ ID NO: 6135 - DNA, 21 bp, Homo sapiens
gagctgttatrtgtaaatccg

SEQ ID NO: 6136 - DNA, 21 bp, Homo sapiens
agggcatgtartatagggagt

SEQ ID NO: 6137 - DNA, 21 bp, Homo sapiens
tgtctccttcmgccttctgtt

SEQ ID NO: 6138 - DNA, 21 bp, Homo sapiens
atatgcccagrgcctggtact

SEQ ID NO: 6139 - DNA, 21 bp, Homo sapiens
tataccagaamcttaaattaa

SEQ ID NO: 6140 - DNA, 21 bp, Homo sapiens
taaggattctrtgatgcttca

SEQ ID NO: 6141 - DNA, 21 bp, Homo sapiens
tttttgattcmggctgcttct

SEQ ID NO: 6142 - DNA, 21 bp, Homo sapiens
tactattgctrtcttgatacg

SEQ ID NO: 6143 - DNA, 21 bp, Homo sapiens
aagaaggtgckgagtaatttt

SEQ ID NO: 6144 - DNA, 21 bp, Homo sapiens
tcagcatctgraagtagagat

SEQ ID NO: 6145 - DNA, 21 bp, Homo sapiens
gctaattgcaygaatctgggc

SEQ ID NO: 6146 - DNA, 21 bp, Homo sapiens
aagaaaattcyaaactgtttg

SEQ ID NO: 6147 - DNA, 21 bp, Homo sapiens
ctgaaaggaarttcaacatgg

SEQ ID NO: 6148 - DNA, 21 bp, Homo sapiens
gtctgcaggtrtctttaaatt

SEQ ID NO: 6149 - DNA, 21 bp, Homo sapiens
tttttataatsttctctgcag

SEQ ID NO: 6150 - DNA, 21 bp, Homo sapiens
aaaagatggcyctgcgttagg

SEQ ID NO: 6151 - DNA, 21 bp, Homo sapiens
tggtttttcarctatatacct

SEQ ID NO: 6152 - DNA, 21 bp, Homo sapiens
gaaatttaggraatgtttaaa

SEQ ID NO: 6153 - DNA, 21 bp, Homo sapiens
tgggacatatyttgcagagag

SEQ ID NO: 6154 - DNA, 21 bp, Homo sapiens
ttcattcagcraatatttatt

SEQ ID NO: 6155 - DNA, 21 bp, Homo sapiens
ctgtagtcatytatcatcttt

SEQ ID NO: 6156 - DNA, 21 bp, Homo sapiens
atatccaaatyggagctaaat

SEQ ID NO: 6157 - DNA, 21 bp, Homo sapiens
actgaaataaygtgaatttgt

SEQ ID NO: 6158 - DNA, 21 bp, Homo sapiens
caataatattktggactcatc

SEQ ID NO: 6159 - DNA, 21 bp, Homo sapiens
aacccttccaygggtgagaat

SEQ ID NO: 6160 - DNA, 21 bp, Homo sapiens
ggtttatccaragttcaaagt

SEQ ID NO: 6161 - DNA, 21 bp, Homo sapiens
tcttgaatgtstcagtcattg

SEQ ID NO: 6162 - DNA, 21 bp, Homo sapiens
ggccaaaataycacaatgaac

SEQ ID NO: 6163 - DNA, 21 bp, Homo sapiens
gcagctagaaygccaggcaga

SEQ ID NO: 6164 - DNA, 21 bp, Homo sapiens
agaattctccwttgactcctt

SEQ ID NO: 6165 - DNA, 21 bp, Homo sapiens
tcatcaaattmatctccttca

SEQ ID NO: 6166 - DNA, 21 bp, Homo sapiens
ctaagaagcaygaatttagaa

SEQ ID NO: 6167 - DNA, 21 bp, Homo sapiens
acaaaatcgtkattactttgg

SEQ ID NO: 6168 - DNA, 21 bp, Homo sapiens
tactataaatrgaaatagtcc

SEQ ID NO: 6169 - DNA, 21 bp, Homo sapiens
agaaatagtcygccttattgc

SEQ ID NO: 6170 - DNA, 21 bp, Homo sapiens
gaatctatggytttcaacatt

SEQ ID NO: 6171 - DNA, 21 bp, Homo sapiens
taagaatttcmgatttagata

SEQ ID NO: 6172 - DNA, 21 bp, Homo sapiens
tcatgaatggrttatgtaact

SEQ ID NO: 6173 - DNA, 21 bp, Homo sapiens
ttgttttcttratctgttgca

SEQ ID NO: 6174 - DNA, 21 bp, Homo sapiens
tctatgaaatyttgacacatt

SEQ ID NO: 6175 - DNA, 21 bp, Homo sapiens
acctatgctgsgtataaagga

SEQ ID NO: 6176 - DNA, 21 bp, Homo sapiens
tataaactacrtaagaataat

SEQ ID NO: 6177 - DNA, 21 bp, Homo sapiens
ggtataattayagtagccttt

SEQ ID NO: 6178 - DNA, 21 bp, Homo sapiens
aatcttatgayagctgagagt

SEQ ID NO: 6179 - DNA, 21 bp, Homo sapiens
cacatttctcygagtacaaac

SEQ ID NO: 6180 - DNA, 21 bp, Homo sapiens
cacgtttcctyatcctgcaga

SEQ ID NO: 6181 - DNA, 21 bp, Homo sapiens
gataaccgaarggttccaaaa

SEQ ID NO: 6182 - DNA, 21 bp, Homo sapiens
attctgcttcytgtactcttt

SEQ ID NO: 6183 - DNA, 21 bp, Homo sapiens
acatttagtgrgggattcgtg

SEQ ID NO: 6184 - DNA, 21 bp, Homo sapiens
tgagagcttcrtagtagagat

SEQ ID NO: 6185 - DNA, 21 bp, Homo sapiens
ctgacacgaakccttactaac

SEQ ID NO: 6186 - DNA, 21 bp, Homo sapiens
aaactgaaatscaggggattt

SEQ ID NO: 6187 - DNA, 21 bp, Homo sapiens
aactgttagartattcttctt

SEQ ID NO: 6188 - DNA, 21 bp, Homo sapiens
cccaaatgttratggctggta

SEQ ID NO: 6189 - DNA, 21 bp, Homo sapiens
taggagaatcrgaattattgg

SEQ ID NO: 6190 - DNA, 21 bp, Homo sapiens
gatagcctaakcctttatgca

SEQ ID NO: 6191 - DNA, 21 bp, Homo sapiens
atttaagccamagtctataaa

SEQ ID NO: 6192 - DNA, 21 bp, Homo sapiens
ctactctaccmagccatgctt

SEQ ID NO: 6193 - DNA, 21 bp, Homo sapiens
cagcaactacygcctggttac

SEQ ID NO: 6194 - DNA, 21 bp, Homo sapiens
taattgaaatstctgttgttg

SEQ ID NO: 6195 - DNA, 21 bp, Homo sapiens
tcattgttccycatgacatac

SEQ ID NO: 6196 - DNA, 21 bp, Homo sapiens
tataaaagggmatacaatggc

SEQ ID NO: 6197 - DNA, 21 bp, Homo sapiens
ttttgaaatgrattagcgact

SEQ ID NO: 6198 - DNA, 21 bp, Homo sapiens
cttgcacatamcaaatgttaa

SEQ ID NO: 6199 - DNA, 21 bp, Homo sapiens
ttgaataatgrttcttatgga

SEQ ID NO: 6200 - DNA, 21 bp, Homo sapiens
tttcctctggwtcgatttgta

SEQ ID NO: 6201 - DNA, 21 bp, Homo sapiens
gctatcaagakaaagaaaaat

SEQ ID NO: 6202 - DNA, 21 bp, Homo sapiens
gcaacattttyttcccctagc

SEQ ID NO: 6203 - DNA, 21 bp, Homo sapiens
ttctgtggctstggtgaaagg

SEQ ID NO: 6204 - DNA, 21 bp, Homo sapiens
ctaattgttaygcagttgaca

SEQ ID NO: 6205 - DNA, 21 bp, Homo sapiens
ttgccaaaggsctttttttct

SEQ ID NO: 6206 - DNA, 21 bp, Homo sapiens
tccatcagtcyaaaaagaaac

SEQ ID NO: 6207 - DNA, 21 bp, Homo sapiens
caggagcctarccgtctatta

SEQ ID NO: 6208 - DNA, 21 bp, Homo sapiens
aaatgggaatrttttagaagt

SEQ ID NO: 6209 - DNA, 21 bp, Homo sapiens
tcctcctgttrctgatttcta

SEQ ID NO: 6210 - DNA, 21 bp, Homo sapiens
gaagaattaayaccagtctta

SEQ ID NO: 6211 - DNA, 21 bp, Homo sapiens
tacactaagcstatggcctta

SEQ ID NO: 6212 - DNA, 21 bp, Homo sapiens
tttctctacakctcacctttt

SEQ ID NO: 6213 - DNA, 21 bp, Homo sapiens
acagaattgamtcatataact

SEQ ID NO: 6214 - DNA, 21 bp, Homo sapiens
aagttttgagrggaatgattg

SEQ ID NO: 6215 - DNA, 21 bp, Homo sapiens
atttttacccrtccttcttga

SEQ ID NO: 6216 - DNA, 21 bp, Homo sapiens
gcaaatatttrttattgcttc

SEQ ID NO: 6217 - DNA, 21 bp, Homo sapiens
aagaaagacaytgagtttgaa

SEQ ID NO: 6218 - DNA, 21 bp, Homo sapiens
tcttctcttcycaggatgttg

SEQ ID NO: 6219 - DNA, 21 bp, Homo sapiens
ttactctctcrctgtatgatg

SEQ ID NO: 6220 - DNA, 21 bp, Homo sapiens
taatttggtcstcagggttga

SEQ ID NO: 6221 - DNA, 21 bp, Homo sapiens
tctcaccgggrctttcagagg

SEQ ID NO: 6222 - DNA, 21 bp, Homo sapiens
atggctataayatatattgat

SEQ ID NO: 6223 - DNA, 21 bp, Homo sapiens
tgagtgcttayaggaaaaagt

SEQ ID NO: 6224 - DNA, 21 bp, Homo sapiens
taatctaaacygggagaataa

SEQ ID NO: 6225 - DNA, 21 bp, Homo sapiens
aagaaaaatgycaaaatacat

SEQ ID NO: 6226 - DNA, 21 bp, Homo sapiens
ttcctggcttscatcttcaca

SEQ ID NO: 6227 - DNA, 21 bp, Homo sapiens
ttgatgtctcycttaaaggga

SEQ ID NO: 6228 - DNA, 21 bp, Homo sapiens
taatccttgtytccatgtccc

SEQ ID NO: 6229 - DNA, 21 bp, Homo sapiens
taatattaggytcaatatact

SEQ ID NO: 6230 - DNA, 21 bp, Homo sapiens
gcctcctaacygtatatatgt

SEQ ID NO: 6231 - DNA, 21 bp, Homo sapiens
ttaaactttcraagagattaa

SEQ ID NO: 6232 - DNA, 21 bp, Homo sapiens
tttggtttgayaatttggtaa

SEQ ID NO: 6233 - DNA, 21 bp, Homo sapiens
agacatcctawaaaggttcta

SEQ ID NO: 6234 - DNA, 21 bp, Homo sapiens
aaatatctggkcctaatcctt

SEQ ID NO: 6235 - DNA, 21 bp, Homo sapiens
gatttctattyctcatctctt

SEQ ID NO: 6236 - DNA, 21 bp, Homo sapiens
ggaaaaaggamggcggaggca

SEQ ID NO: 6237 - DNA, 21 bp, Homo sapiens
ttaggttgatrtttactctca

SEQ ID NO: 6238 - DNA, 21 bp, Homo sapiens
actacgttagraactttctgt

SEQ ID NO: 6239 - DNA, 21 bp, Homo sapiens
tatttctggastctctattcc

SEQ ID NO: 6240 - DNA, 21 bp, Homo sapiens
taacataatgkttgtagcttg

SEQ ID NO: 6241 - DNA, 21 bp, Homo sapiens
taaagttttaragtttcagaa

SEQ ID NO: 6242 - DNA, 21 bp, Homo sapiens
attccacaaawctatgttgac

SEQ ID NO: 6243 - DNA, 21 bp, Homo sapiens
tggtccctcamagttcactaa

SEQ ID NO: 6244 - DNA, 21 bp, Homo sapiens
agataatatgygtaaagaaac

SEQ ID NO: 6245 - DNA, 21 bp, Homo sapiens
cattcccatakactatgattg

SEQ ID NO: 6246 - DNA, 21 bp, Homo sapiens
aaggaggtaaytgagacaagt

SEQ ID NO: 6247 - DNA, 21 bp, Homo sapiens
gatgttttagrcaacaagaac

SEQ ID NO: 6248 - DNA, 21 bp, Homo sapiens
ctggaaaagaragtgcttatc

SEQ ID NO: 6249 - DNA, 21 bp, Homo sapiens
aggttcctttrtatgcattaa

SEQ ID NO: 6250 - DNA, 21 bp, Homo sapiens
caaaagaagartgttctgtga

SEQ ID NO: 6251 - DNA, 21 bp, Homo sapiens
gcttaaagctrctggcttctg

SEQ ID NO: 6252 - DNA, 21 bp, Homo sapiens
cagagggatcrtcaaactact

SEQ ID NO: 6253 - DNA, 21 bp, Homo sapiens
tgaaagcaatrtagaaaagct

SEQ ID NO: 6254 - DNA, 21 bp, Homo sapiens
gaaacatccaratctttgcag

SEQ ID NO: 6255 - DNA, 21 bp, Homo sapiens
ataattcagcmgttgatattt

SEQ ID NO: 6256 - DNA, 21 bp, Homo sapiens
atatctgtggrtacattggtc

SEQ ID NO: 6257 - DNA, 21 bp, Homo sapiens
ttttgaactaygcaactagga

SEQ ID NO: 6258 - DNA, 21 bp, Homo sapiens
aagttttaaamatttttaaat

SEQ ID NO: 6259 - DNA, 21 bp, Homo sapiens
cagggcagttktgctaataaa

SEQ ID NO: 6260 - DNA, 21 bp, Homo sapiens
gctgtttgctrtttattcctg

SEQ ID NO: 6261 - DNA, 21 bp, Homo sapiens
agaaagccatrcatacatttt

SEQ ID NO: 6262 - DNA, 21 bp, Homo sapiens
gatcaaatggrcattcttttc

SEQ ID NO: 6263 - DNA, 21 bp, Homo sapiens
aactcctattyaccctttagg

SEQ ID NO: 6264 - DNA, 21 bp, Homo sapiens
gactaaaaaaraactagcttt

SEQ ID NO: 6265 - DNA, 21 bp, Homo sapiens
gtgtttttttyctctgggcat

SEQ ID NO: 6266 - DNA, 21 bp, Homo sapiens
ctaaaatgackgcatggttca

SEQ ID NO: 6267 - DNA, 21 bp, Homo sapiens
gatgccaggcyaggctgaagt

SEQ ID NO: 6268 - DNA, 21 bp, Homo sapiens
tatctttactrtcagacaaga

SEQ ID NO: 6269 - DNA, 21 bp, Homo sapiens
gacaacaactragagaaagaa

SEQ ID NO: 6270 - DNA, 21 bp, Homo sapiens
cctttgtagtsctttactgtt

SEQ ID NO: 6271 - DNA, 21 bp, Homo sapiens
gcctaaaatarcacgctcttt

SEQ ID NO: 6272 - DNA, 21 bp, Homo sapiens
agtgtcggagrattcaagagt

SEQ ID NO: 6273 - DNA, 21 bp, Homo sapiens
ctgcatttggrgttttcctct

SEQ ID NO: 6274 - DNA, 21 bp, Homo sapiens
ttttgcatcarggtttgctca

SEQ ID NO: 6275 - DNA, 21 bp, Homo sapiens
cataaaaaatwaactgtcatt

SEQ ID NO: 6276 - DNA, 21 bp, Homo sapiens
atatcattatrtaacaaatgc

SEQ ID NO: 6277 - DNA, 21 bp, Homo sapiens
atgctttagawattaatgtat

SEQ ID NO: 6278 - DNA, 21 bp, Homo sapiens
aaatagccacwtcttattcaa

SEQ ID NO: 6279 - DNA, 21 bp, Homo sapiens
atcactttgtsttaagtttct

SEQ ID NO: 6280 - DNA, 21 bp, Homo sapiens
aacctaaacaraagcctagtc

SEQ ID NO: 6281 - DNA, 21 bp, Homo sapiens
cattgtgcctrggggaattat

SEQ ID NO: 6282 - DNA, 21 bp, Homo sapiens
aaggaaccaastggagagtca

SEQ ID NO: 6283 - DNA, 21 bp, Homo sapiens
cattctgtagytggagttgtc

SEQ ID NO: 6284 - DNA, 21 bp, Homo sapiens
ctaataaaaamcaaaacaagc

SEQ ID NO: 6285 - DNA, 21 bp, Homo sapiens
cccttgctgawcctatgattc

SEQ ID NO: 6286 - DNA, 21 bp, Homo sapiens
tgttccttttygttgcatagt

SEQ ID NO: 6287 - DNA, 21 bp, Homo sapiens
ccatacctagrtgcaaacagc

SEQ ID NO: 6288 - DNA, 21 bp, Homo sapiens
gttttgttttyttaaacctgt

SEQ ID NO: 6289 - DNA, 21 bp, Homo sapiens
ctctcgcagcmctgttttctc

SEQ ID NO: 6290 - DNA, 21 bp, Homo sapiens
tttcactgttraagattttgt

SEQ ID NO: 6291 - DNA, 21 bp, Homo sapiens
tgctggaaggraattgtctga

SEQ ID NO: 6292 - DNA, 21 bp, Homo sapiens
aaaattttaaktaatttgtaa

SEQ ID NO: 6293 - DNA, 21 bp, Homo sapiens
atctgatgtargaatgtacag

SEQ ID NO: 6294 - DNA, 21 bp, Homo sapiens
tattaatgagkatatttccct

SEQ ID NO: 6295 - DNA, 21 bp, Homo sapiens
ctcataagccyggctaccaaa

SEQ ID NO: 6296 - DNA, 21 bp, Homo sapiens
actgctgttcrgccaaatctg

SEQ ID NO: 6297 - DNA, 21 bp, Homo sapiens
gaagttcacarttggatatgc

SEQ ID NO: 6298 - DNA, 21 bp, Homo sapiens
atctttacgtrtgtattctgt

SEQ ID NO: 6299 - DNA, 21 bp, Homo sapiens
cctcctccacycttttcccct

SEQ ID NO: 6300 - DNA, 21 bp, Homo sapiens
tttttacttayataaaataat

SEQ ID NO: 6301 - DNA, 21 bp, Homo sapiens
tggtgaatttrtagttcttag

SEQ ID NO: 6302 - DNA, 21 bp, Homo sapiens
tcccttgaacygcttcaccca

SEQ ID NO: 6303 - DNA, 21 bp, Homo sapiens
gccaaatgaaygtaatgtaca

SEQ ID NO: 6304 - DNA, 21 bp, Homo sapiens
ccaaaacatayatttgtcttc

SEQ ID NO: 6305 - DNA, 21 bp, Homo sapiens
tctccattcartcagggtcaa

SEQ ID NO: 6306 - DNA, 21 bp, Homo sapiens
ttctgaggttrttggttgatt

SEQ ID NO: 6307 - DNA, 21 bp, Homo sapiens
ttaagggaaawatgagagatt

SEQ ID NO: 6308 - DNA, 21 bp, Homo sapiens
atctactctcygtatgtttct

SEQ ID NO: 6309 - DNA, 21 bp, Homo sapiens
aaggttatgaygctcccataa

SEQ ID NO: 6310 - DNA, 21 bp, Homo sapiens
catgtagcacsaggctcggta

SEQ ID NO: 6311 - DNA, 21 bp, Homo sapiens
tccatattggmgcataatata

SEQ ID NO: 6312 - DNA, 21 bp, Homo sapiens
tagatatgtayaataacattt

SEQ ID NO: 6313 - DNA, 21 bp, Homo sapiens
atacttgggtrtgcctgttgg

SEQ ID NO: 6314 - DNA, 21 bp, Homo sapiens
ttgaatttcayttagaagaga

SEQ ID NO: 6315 - DNA, 21 bp, Homo sapiens
gatgacttacytgcttcattc

SEQ ID NO: 6316 - DNA, 21 bp, Homo sapiens
atgacctagargaagaggatt

SEQ ID NO: 6317 - DNA, 21 bp, Homo sapiens
cctctacggcrgccagtgatg

SEQ ID NO: 6318 - DNA, 21 bp, Homo sapiens
gggataaaagrgaaataaaat

SEQ ID NO: 6319 - DNA, 21 bp, Homo sapiens
tatatattctkgataaacaga

SEQ ID NO: 6320 - DNA, 21 bp, Homo sapiens
atggagtaagrgtacctttca

SEQ ID NO: 6321 - DNA, 21 bp, Homo sapiens
agtttgagagrggcttaggta

SEQ ID NO: 6322 - DNA, 21 bp, Homo sapiens
acaattaataygggaatttgg

SEQ ID NO: 6323 - DNA, 21 bp, Homo sapiens
ttcactgacaygaaacaccca

SEQ ID NO: 6324 - DNA, 21 bp, Homo sapiens
ctttaatctgrtaagtgtgct

SEQ ID NO: 6325 - DNA, 21 bp, Homo sapiens
ccaatagtcayatggttcaaa

SEQ ID NO: 6326 - DNA, 21 bp, Homo sapiens
tgttaattaarctgcccctat

SEQ ID NO: 6327 - DNA, 21 bp, Homo sapiens
ctatactccamtttatttcct

SEQ ID NO: 6328 - DNA, 21 bp, Homo sapiens
cttaaaaatamtttttgggtg

SEQ ID NO: 6329 - DNA, 21 bp, Homo sapiens
tccaattatgscactttgagg

SEQ ID NO: 6330 - DNA, 21 bp, Homo sapiens
cagtgggtaaytgtcagccct

SEQ ID NO: 6331 - DNA, 21 bp, Homo sapiens
tgtccctctartaagaaagcc

SEQ ID NO: 6332 - DNA, 21 bp, Homo sapiens
agggcagggaygatgatgaag

SEQ ID NO: 6333 - DNA, 21 bp, Homo sapiens
tcttcttcttrtggaacattg

SEQ ID NO: 6334 - DNA, 21 bp, Homo sapiens
tcatctttcartgcttcataa

SEQ ID NO: 6335 - DNA, 21 bp, Homo sapiens
tgttatctcckcttgctgaat

SEQ ID NO: 6336 - DNA, 21 bp, Homo sapiens
ctcagcaaagrttaactgcct

SEQ ID NO: 6337 - DNA, 21 bp, Homo sapiens
ttagaacatakcaacaggaat

SEQ ID NO: 6338 - DNA, 21 bp, Homo sapiens
gacccagattsctcccatatt

SEQ ID NO: 6339 - DNA, 21 bp, Homo sapiens
aaaccttcttwgctgaatccc

SEQ ID NO: 6340 - DNA, 21 bp, Homo sapiens
aggagcctctkcgtggacaca

SEQ ID NO: 6341 - DNA, 21 bp, Homo sapiens
aactgaggacwttctttaaaa

SEQ ID NO: 6342 - DNA, 21 bp, Homo sapiens
tgtgagcagargttgctaaga

SEQ ID NO: 6343 - DNA, 21 bp, Homo sapiens
acttgtgggakttctcatatt

SEQ ID NO: 6344 - DNA, 21 bp, Homo sapiens
ccacgggcagrgagagcctgt

SEQ ID NO: 6345 - DNA, 21 bp, Homo sapiens
atgaccaccakgtagagagga

SEQ ID NO: 6346 - DNA, 21 bp, Homo sapiens
taggtaatttsggggaaggtg

SEQ ID NO: 6347 - DNA, 21 bp, Homo sapiens
ggagatggagraaggagcttg

SEQ ID NO: 6348 - DNA, 21 bp, Homo sapiens
caggtctgcayccggggactg

SEQ ID NO: 6349 - DNA, 21 bp, Homo sapiens
cacacctcccmtccttcttgc

SEQ ID NO: 6350 - DNA, 21 bp, Homo sapiens
ataaccctggkcataatatga

SEQ ID NO: 6351 - DNA, 21 bp, Homo sapiens
aagtgccaggyctggaaactg

SEQ ID NO: 6352 - DNA, 21 bp, Homo sapiens
ccctcctggtytacattacac

SEQ ID NO: 6353 - DNA, 21 bp, Homo sapiens
taactgcttcwccttgacaag

SEQ ID NO: 6354 - DNA, 21 bp, Homo sapiens
gtatggaggarcataatttct

SEQ ID NO: 6355 - DNA, 21 bp, Homo sapiens
acgtaggttcrgtggtatagt

SEQ ID NO: 6356 - DNA, 21 bp, Homo sapiens
ttcctcttgtkgaatagcaga

SEQ ID NO: 6357 - DNA, 21 bp, Homo sapiens
gaggccgggcrtggagtacac

SEQ ID NO: 6358 - DNA, 21 bp, Homo sapiens
ggattttggcraaaactagcc

SEQ ID NO: 6359 - DNA, 21 bp, Homo sapiens
ctcacacttaycaggagagaa

SEQ ID NO: 6360 - DNA, 21 bp, Homo sapiens
cttctcttggrttcaccttct

SEQ ID NO: 6361 - DNA, 21 bp, Homo sapiens
atctttactgrtcacattgct

SEQ ID NO: 6362 - DNA, 21 bp, Homo sapiens
tcttctccacycatggaagag

SEQ ID NO: 6363 - DNA, 21 bp, Homo sapiens
gtggtgggaaygtgatttgac

SEQ ID NO: 6364 - DNA, 21 bp, Homo sapiens
acacgatgtaygtggagccat

SEQ ID NO: 6365 - DNA, 21 bp, Homo sapiens
acacaactaayggaaagaatt

SEQ ID NO: 6366 - DNA, 21 bp, Homo sapiens
cttctcaagaycatgtactca

SEQ ID NO: 6367 - DNA, 21 bp, Homo sapiens
tgtttggtgarttatttaatt

SEQ ID NO: 6368 - DNA, 21 bp, Homo sapiens
tgaagggattkccaaacatgg

SEQ ID NO: 6369 - DNA, 21 bp, Homo sapiens
agtcaaaagamataaaatgaa

SEQ ID NO: 6370 - DNA, 21 bp, Homo sapiens
ccttctgctgytccgtgaccc

SEQ ID NO: 6371 - DNA, 21 bp, Homo sapiens
cgggtacaggmgacttggcag

SEQ ID NO: 6372 - DNA, 21 bp, Homo sapiens
ggaatagaagmaacacacaat

SEQ ID NO: 6373 - DNA, 21 bp, Homo sapiens
atatctgacaytacgtctcag

SEQ ID NO: 6374 - DNA, 21 bp, Homo sapiens
ctggctttccwctttctacct

SEQ ID NO: 6375 - DNA, 21 bp, Homo sapiens
tatttacctcyatatcctctg

SEQ ID NO: 6376 - DNA, 21 bp, Homo sapiens
attgaataagmaagctgagca

SEQ ID NO: 6377 - DNA, 21 bp, Homo sapiens
acaagtgacaraaaagctaat

SEQ ID NO: 6378 - DNA, 21 bp, Homo sapiens
tcacaggaacraggaatgatc

SEQ ID NO: 6379 - DNA, 21 bp, Homo sapiens
tgcagatattsttgtccctag

SEQ ID NO: 6380 - DNA, 21 bp, Homo sapiens
gccacattctyttacctgatc

SEQ ID NO: 6381 - DNA, 21 bp, Homo sapiens
ctgatggggayttttcaaggt

SEQ ID NO: 6382 - DNA, 21 bp, Homo sapiens
cacatacacastgtctgttca

SEQ ID NO: 6383 - DNA, 21 bp, Homo sapiens
caaagagtgcytggggagggt

SEQ ID NO: 6384 - DNA, 21 bp, Homo sapiens
tctgccaaaaygactgcaatc

SEQ ID NO: 6385 - DNA, 21 bp, Homo sapiens
gtctttgggarctcctgagaa

SEQ ID NO: 6386 - DNA, 21 bp, Homo sapiens
cgcgaaggagkgaaacacacc

SEQ ID NO: 6387 - DNA, 21 bp, Homo sapiens
cacctgctgakctctggtttc

SEQ ID NO: 6388 - DNA, 21 bp, Homo sapiens
atttattgagygagcccatcg

SEQ ID NO: 6389 - DNA, 21 bp, Homo sapiens
tttgcttagtrcatattattg

SEQ ID NO: 6390 - DNA, 21 bp, Homo sapiens
gccctgtatcygacagggttc

SEQ ID NO: 6391 - DNA, 21 bp, Homo sapiens
agtttaggctwggactcttgc

SEQ ID NO: 6392 - DNA, 21 bp, Homo sapiens
tcttgggccayggagatgcac

SEQ ID NO: 6393 - DNA, 21 bp, Homo sapiens
tccaactgtayattcattctt

SEQ ID NO: 6394 - DNA, 21 bp, Homo sapiens
ctttatgtggyctccaccagc

SEQ ID NO: 6395 - DNA, 21 bp, Homo sapiens
atgctctcagycagaagtagc

SEQ ID NO: 6396 - DNA, 21 bp, Homo sapiens
cctattaaaastgtgactggt

SEQ ID NO: 6397 - DNA, 21 bp, Homo sapiens
ggaattccaasggcttgtgaa

SEQ ID NO: 6398 - DNA, 21 bp, Homo sapiens
aggaggagaartgtctgctat

SEQ ID NO: 6399 - DNA, 21 bp, Homo sapiens
tctaaggtgtsagagaggata

SEQ ID NO: 6400 - DNA, 21 bp, Homo sapiens
cttatcttacrtggtgacttc

SEQ ID NO: 6401 - DNA, 21 bp, Homo sapiens
ccattacactktgacctcata

SEQ ID NO: 6402 - DNA, 21 bp, Homo sapiens
agttttcaagygtgccctctg

SEQ ID NO: 6403 - DNA, 21 bp, Homo sapiens
ttccccccccmaaaaaaagtt

SEQ ID NO: 6404 - DNA, 21 bp, Homo sapiens
ggtccattttsaagctaccat

SEQ ID NO: 6405 - DNA, 21 bp, Homo sapiens
gaatgtgaccmgagagaggga

SEQ ID NO: 6406 - DNA, 21 bp, Homo sapiens
aagtaaacaarcagttattat

SEQ ID NO: 6407 - DNA, 21 bp, Homo sapiens
gttctaccagytgcgatgacc

SEQ ID NO: 6408 - DNA, 21 bp, Homo sapiens
gatgacttccyacttcaactc

SEQ ID NO: 6409 - DNA, 21 bp, Homo sapiens
caatcagtcarccgaaactag

SEQ ID NO: 6410 - DNA, 21 bp, Homo sapiens
tgcctagaagkgttacttggg

SEQ ID NO: 6411 - DNA, 21 bp, Homo sapiens
acttggggcargggtggtgaa

SEQ ID NO: 6412 - DNA, 21 bp, Homo sapiens
gtctgatttgrctttgtgtag

SEQ ID NO: 6413 - DNA, 21 bp, Homo sapiens
tatctggaagraatgagaact

SEQ ID NO: 6414 - DNA, 21 bp, Homo sapiens
tcagagttgtraaagaccctc

SEQ ID NO: 6415 - DNA, 21 bp, Homo sapiens
acctcaatgcwtgcaaattaa

SEQ ID NO: 6416 - DNA, 21 bp, Homo sapiens
aactagaaggkttattgtttt

SEQ ID NO: 6417 - DNA, 21 bp, Homo sapiens
ccaacattgcraaaaggccta

SEQ ID NO: 6418 - DNA, 21 bp, Homo sapiens
ttttttcattytaagcctggc

SEQ ID NO: 6419 - DNA, 21 bp, Homo sapiens
tattaagtctrttacgtatac

SEQ ID NO: 6420 - DNA, 21 bp, Homo sapiens
cgtcatggctktccttgcttc

SEQ ID NO: 6421 - DNA, 21 bp, Homo sapiens
tgtttatgtgkttggtttgag

SEQ ID NO: 6422 - DNA, 21 bp, Homo sapiens
tatttgggcargaataataaa

SEQ ID NO: 6423 - DNA, 21 bp, Homo sapiens
ggcattggcarcgccttctgg

SEQ ID NO: 6424 - DNA, 21 bp, Homo sapiens
gagagtgcatsggagtgcatc

SEQ ID NO: 6425 - DNA, 21 bp, Homo sapiens
ggagtggtcaygggccacttt

SEQ ID NO: 6426 - DNA, 21 bp, Homo sapiens
gcgtgaccccrtctctctgtc

SEQ ID NO: 6427 - DNA, 21 bp, Homo sapiens
gcatttctccrgcagccgacc

SEQ ID NO: 6428 - DNA, 21 bp, Homo sapiens
tgtgtcagtgsagcccttcgc

SEQ ID NO: 6429 - DNA, 21 bp, Homo sapiens
gggtagggacrtggagtctga

SEQ ID NO: 6430 - DNA, 21 bp, Homo sapiens
aagcaaacccrttccccaagg

SEQ ID NO: 6431 - DNA, 21 bp, Homo sapiens
gactggacccrggttctgatt

SEQ ID NO: 6432 - DNA, 21 bp, Homo sapiens
ctctctatcaytgtgaaatgg

SEQ ID NO: 6433 - DNA, 21 bp, Homo sapiens
gtttaaaatastcaccggaga

SEQ ID NO: 6434 - DNA, 21 bp, Homo sapiens
atgcatttgcrtggggcttgg

SEQ ID NO: 6435 - DNA, 21 bp, Homo sapiens
tgcctagaagmactgaggctg

SEQ ID NO: 6436 - DNA, 21 bp, Homo sapiens
ttcttcctgtmatcttctccc

SEQ ID NO: 6437 - DNA, 21 bp, Homo sapiens
gcccactcccygcgctggcga

SEQ ID NO: 6438 - DNA, 21 bp, Homo sapiens
caccttgggtrgtaaaggtgg

SEQ ID NO: 6439 - DNA, 21 bp, Homo sapiens
gtctggtggayaaagaagaaa

SEQ ID NO: 6440 - DNA, 21 bp, Homo sapiens
tttagcaaagytgtttatttt

SEQ ID NO: 6441 - DNA, 21 bp, Homo sapiens
gcctttccagygtttgcagcc

SEQ ID NO: 6442 - DNA, 21 bp, Homo sapiens
tgggggaagasattcctgcac

SEQ ID NO: 6443 - DNA, 21 bp, Homo sapiens
tgagcctgcgsaaggccatca

SEQ ID NO: 6444 - DNA, 21 bp, Homo sapiens
agctgctgagragcaaggacc

SEQ ID NO: 6445 - DNA, 21 bp, Homo sapiens
gtaaatcttcrctttggggtt

SEQ ID NO: 6446 - DNA, 21 bp, Homo sapiens
atgcctccagrgcctgcgatc

SEQ ID NO: 6447 - DNA, 21 bp, Homo sapiens
cagcacggtgsggggcaggca

SEQ ID NO: 6448 - DNA, 21 bp, Homo sapiens
agggaagacaycccctgcccc

SEQ ID NO: 6449 - DNA, 21 bp, Homo sapiens
caagggatgcrttttaattta

SEQ ID NO: 6450 - DNA, 21 bp, Homo sapiens
ttagactgacmgtcggtagct

SEQ ID NO: 6451 - DNA, 21 bp, Homo sapiens
actagaattcygaagcagtgg

SEQ ID NO: 6452 - DNA, 21 bp, Homo sapiens
tttcttccagmcctaaaattc

SEQ ID NO: 6453 - DNA, 21 bp, Homo sapiens
ttacattgagygagtagggga

SEQ ID NO: 6454 - DNA, 21 bp, Homo sapiens
atgagatgtcrtaggctggga

SEQ ID NO: 6455 - DNA, 21 bp, Homo sapiens
tatcccaagcyccttagacaa

SEQ ID NO: 6456 - DNA, 21 bp, Homo sapiens
ggatgcagcartttcttgcca

SEQ ID NO: 6457 - DNA, 21 bp, Homo sapiens
actccttgcamcttggccgac

SEQ ID NO: 6458 - DNA, 21 bp, Homo sapiens
cgtcttcaccrcagccatgta

SEQ ID NO: 6459 - DNA, 21 bp, Homo sapiens
tgtggccctgsctgtaatctc

SEQ ID NO: 6460 - DNA, 21 bp, Homo sapiens
tatcatatttycatccgttaa

SEQ ID NO: 6461 - DNA, 21 bp, Homo sapiens
caagagcctcrgggctggccc

SEQ ID NO: 6462 - DNA, 21 bp, Homo sapiens
aaccttgtgaygctaacagga

SEQ ID NO: 6463 - DNA, 21 bp, Homo sapiens
gacgctaacargaaagagaag

SEQ ID NO: 6464 - DNA, 21 bp, Homo sapiens
tgcaccgttcrccatgagatt

SEQ ID NO: 6465 - DNA, 21 bp, Homo sapiens
tggcggagagwcccctgctct

SEQ ID NO: 6466 - DNA, 21 bp, Homo sapiens
acagaaggagyaaacccaagg

SEQ ID NO: 6467 - DNA, 21 bp, Homo sapiens
tgggctgctcygaagcagtct

SEQ ID NO: 6468 - DNA, 21 bp, Homo sapiens
tatccttgccycatcactttg

SEQ ID NO: 6469 - DNA, 21 bp, Homo sapiens
tgctgccaacwttccttggct

SEQ ID NO: 6470 - DNA, 21 bp, Homo sapiens
ccccacctgcrggcaagggat

SEQ ID NO: 6471 - DNA, 21 bp, Homo sapiens
gtaatgcactrcctcgtgaac

SEQ ID NO: 6472 - DNA, 21 bp, Homo sapiens
tgtgatgaccyggtaggggtg

SEQ ID NO: 6473 - DNA, 21 bp, Homo sapiens
gatgtgaggayatctggatgt

SEQ ID NO: 6474 - DNA, 21 bp, Homo sapiens
cagcagttctyctttcatgac

SEQ ID NO: 6475 - DNA, 21 bp, Homo sapiens
ttgattggccyggctcagaga

SEQ ID NO: 6476 - DNA, 21 bp, Homo sapiens
ggaaggttttragggaaggtg

SEQ ID NO: 6477 - DNA, 21 bp, Homo sapiens
gccaggaggcrttgtaagcat

SEQ ID NO: 6478 - DNA, 21 bp, Homo sapiens
ccttcacttcyctaaggcctg

SEQ ID NO: 6479 - DNA, 21 bp, Homo sapiens
aagaagcactsgaggaatgta

SEQ ID NO: 6480 - DNA, 21 bp, Homo sapiens
cccaagtcagrcagggatccc

SEQ ID NO: 6481 - DNA, 21 bp, Homo sapiens
cagtaaataaraacccagaag

SEQ ID NO: 6482 - DNA, 21 bp, Homo sapiens
cagtcctcctrgcccttgaag

SEQ ID NO: 6483 - DNA, 21 bp, Homo sapiens
tgagcaggtgwtatggaggag

SEQ ID NO: 6484 - DNA, 21 bp, Homo sapiens
cccaggccacytccccatcca

SEQ ID NO: 6485 - DNA, 21 bp, Homo sapiens
gggccgccatycaggcctctg

SEQ ID NO: 6486 - DNA, 21 bp, Homo sapiens
tgcaagctggrgggctcaggg

SEQ ID NO: 6487 - DNA, 21 bp, Homo sapiens
ggtgaagtctrcatcctgggg

SEQ ID NO: 6488 - DNA, 21 bp, Homo sapiens
ccctgagtaayagactgtcct

SEQ ID NO: 6489 - DNA, 21 bp, Homo sapiens
gtggtcagggkactcaagtcc

SEQ ID NO: 6490 - DNA, 21 bp, Homo sapiens
atttgtttccyataaaggggg

SEQ ID NO: 6491 - DNA, 21 bp, Homo sapiens
gcagacattcsgcacctagca

SEQ ID NO: 6492 - DNA, 21 bp, Homo sapiens
tatttttctaytgaaacaaaa

SEQ ID NO: 6493 - DNA, 21 bp, Homo sapiens
cacccttttcrgaaaatgtgc

SEQ ID NO: 6494 - DNA, 21 bp, Homo sapiens
catgtgattaygcagttgtct

SEQ ID NO: 6495 - DNA, 21 bp, Homo sapiens
ttttagagcayaggacaattc

SEQ ID NO: 6496 - DNA, 21 bp, Homo sapiens
ttgagaggcarcattgtgatt

SEQ ID NO: 6497 - DNA, 21 bp, Homo sapiens
gcaaacagacycatgacgctt

SEQ ID NO: 6498 - DNA, 21 bp, Homo sapiens
tcccagcagcyccgcatgcaa

SEQ ID NO: 6499 - DNA, 21 bp, Homo sapiens
caccgtagackccctggccag

SEQ ID NO: 6500 - DNA, 21 bp, Homo sapiens
ctgaaaagaasacttgtttct

SEQ ID NO: 6501 - DNA, 21 bp, Homo sapiens
agaagccacasccaaattcct

SEQ ID NO: 6502 - DNA, 21 bp, Homo sapiens
ccaggtcagtrgaactaagaa

SEQ ID NO: 6503 - DNA, 21 bp, Homo sapiens
ggaatagagartccagaaata

SEQ ID NO: 6504 - DNA, 21 bp, Homo sapiens
tggagttctgyaatcctcacg

SEQ ID NO: 6505 - DNA, 21 bp, Homo sapiens
gaaatgctagygatgaagggc

SEQ ID NO: 6506 - DNA, 21 bp, Homo sapiens
ttgcaacacayactgacaatg

SEQ ID NO: 6507 - DNA, 21 bp, Homo sapiens
acaaaatctgrttgcctctct

SEQ ID NO: 6508 - DNA, 21 bp, Homo sapiens
tggcaaggacrtagaaaaagt

SEQ ID NO: 6509 - DNA, 21 bp, Homo sapiens
agcagtttgcrctgcttcact

SEQ ID NO: 6510 - DNA, 21 bp, Homo sapiens
atatcaaccawctggcaaaat

SEQ ID NO: 6511 - DNA, 21 bp, Homo sapiens
ggctgaggctygtgctaaatg

SEQ ID NO: 6512 - DNA, 21 bp, Homo sapiens
gcagaaagctratcctaaaat

SEQ ID NO: 6513 - DNA, 21 bp, Homo sapiens
gttataggatrtcgctactga

SEQ ID NO: 6514 - DNA, 21 bp, Homo sapiens
aatctctcagyttgtggaaag

SEQ ID NO: 6515 - DNA, 21 bp, Homo sapiens
cccttgggtgyggttatgaag

SEQ ID NO: 6516 - DNA, 21 bp, Homo sapiens
taggattcttytttggtgtca

SEQ ID NO: 6517 - DNA, 21 bp, Homo sapiens
acaatctttcsatcacactct

SEQ ID NO: 6518 - DNA, 21 bp, Homo sapiens
accaaattagygcatacggag

SEQ ID NO: 6519 - DNA, 21 bp, Homo sapiens
gtttcttcttrtgctgaccct

SEQ ID NO: 6520 - DNA, 21 bp, Homo sapiens
atacaataaakcactaatgag

SEQ ID NO: 6521 - DNA, 21 bp, Homo sapiens
tttcattaacycatttgtcct

SEQ ID NO: 6522 - DNA, 21 bp, Homo sapiens
ggaactgggtmttttccatct

SEQ ID NO: 6523 - DNA, 21 bp, Homo sapiens
gtacccaaatrggaggctggg

SEQ ID NO: 6524 - DNA, 21 bp, Homo sapiens
accgccaatcrtctgcagaaa

SEQ ID NO: 6525 - DNA, 21 bp, Homo sapiens
ttgtccattcrctcaagcctg

SEQ ID NO: 6526 - DNA, 21 bp, Homo sapiens
tgagcctcggygtttattcct

SEQ ID NO: 6527 - DNA, 21 bp, Homo sapiens
gctagagccaraagcaaaacc

SEQ ID NO: 6528 - DNA, 21 bp, Homo sapiens
agaccatggartctgtgaaag

SEQ ID NO: 6529 - DNA, 21 bp, Homo sapiens
catgagtatcyatgccagggg

SEQ ID NO: 6530 - DNA, 21 bp, Homo sapiens
atggcagagcrgagggcagtc

SEQ ID NO: 6531 - DNA, 21 bp, Homo sapiens
gacccctgacrcctttccccg

SEQ ID NO: 6532 - DNA, 21 bp, Homo sapiens
catccaaagtyagtttgtcag

SEQ ID NO: 6533 - DNA, 21 bp, Homo sapiens
tgtggccatcrtcatgagagt

SEQ ID NO: 6534 - DNA, 21 bp, Homo sapiens
gaaagggcaaygtatgaggct

SEQ ID NO: 6535 - DNA, 21 bp, Homo sapiens
gcccctccacygggcagtaat

SEQ ID NO: 6536 - DNA, 21 bp, Homo sapiens
agtgaacctgyacttctcagg

SEQ ID NO: 6537 - DNA, 21 bp, Homo sapiens
atctggctacygggtgagacc

SEQ ID NO: 6538 - DNA, 21 bp, Homo sapiens
aagccggcacyttcatgaact

SEQ ID NO: 6539 - DNA, 21 bp, Homo sapiens
cctcattcccracgagggcct

SEQ ID NO: 6540 - DNA, 21 bp, Homo sapiens
atgctaattasgagataaaac

SEQ ID NO: 6541 - DNA, 21 bp, Homo sapiens
tcgggaacatygagagtttgt

SEQ ID NO: 6542 - DNA, 21 bp, Homo sapiens
catctttacawgtctaggaga

SEQ ID NO: 6543 - DNA, 21 bp, Homo sapiens
aatgcttaacrcacaccccag

SEQ ID NO: 6544 - DNA, 21 bp, Homo sapiens
ttgcacagttrctgaatggga

SEQ ID NO: 6545 - DNA, 21 bp, Homo sapiens
aaggggtaagytgggacccac

SEQ ID NO: 6546 - DNA, 21 bp, Homo sapiens
ccgactccacrgtcaccaaca

SEQ ID NO: 6547 - DNA, 21 bp, Homo sapiens
tgtgaaggacrggaacagagg

SEQ ID NO: 6548 - DNA, 21 bp, Homo sapiens
gactacctgawtgtataagaa

SEQ ID NO: 6549 - DNA, 21 bp, Homo sapiens
ggctgcccccygtgaaggtca

SEQ ID NO: 6550 - DNA, 21 bp, Homo sapiens
ttgttagggawgcagaagcat

SEQ ID NO: 6551 - DNA, 21 bp, Homo sapiens
ggtgcctccaytgcacacgat

SEQ ID NO: 6552 - DNA, 21 bp, Homo sapiens
agccctggagkgttggtctga

SEQ ID NO: 6553 - DNA, 21 bp, Homo sapiens
tgtggggctaygggccaggaa

SEQ ID NO: 6554 - DNA, 21 bp, Homo sapiens
accaatacaaytaataaaccc

SEQ ID NO: 6555 - DNA, 21 bp, Homo sapiens
ggaggagcatrtgaaagggaa

SEQ ID NO: 6556 - DNA, 21 bp, Homo sapiens
ggggggtctgkgggtgagatc

SEQ ID NO: 6557 - DNA, 21 bp, Homo sapiens
atagggtaaarttgtttcttc

SEQ ID NO: 6558 - DNA, 21 bp, Homo sapiens
gaagcaaatayggtaaaattt

SEQ ID NO: 6559 - DNA, 21 bp, Homo sapiens
tggtaggatastcagggaaat

SEQ ID NO: 6560 - DNA, 21 bp, Homo sapiens
agagaaaggarggggaaattt

SEQ ID NO: 6561 - DNA, 21 bp, Homo sapiens
ttctgtcatcmtcatgtctca

SEQ ID NO: 6562 - DNA, 21 bp, Homo sapiens
ctttgtggccracagagttga

SEQ ID NO: 6563 - DNA, 21 bp, Homo sapiens
aaacgggaatratggtcagac

SEQ ID NO: 6564 - DNA, 21 bp, Homo sapiens
atttctctttygtactctttt

SEQ ID NO: 6565 - DNA, 21 bp, Homo sapiens
cttaccctcaygaaaagacaa

SEQ ID NO: 6566 - DNA, 21 bp, Homo sapiens
gtcccatggcyagctgggcct

SEQ ID NO: 6567 - DNA, 21 bp, Homo sapiens
ctcctcacctycgattccgat

SEQ ID NO: 6568 - DNA, 21 bp, Homo sapiens
catgtctcatwtaatccaata

SEQ ID NO: 6569 - DNA, 21 bp, Homo sapiens
tcacataaatkgtgtttggtt

SEQ ID NO: 6570 - DNA, 21 bp, Homo sapiens
tgcagatcacygaatttcccc

SEQ ID NO: 6571 - DNA, 21 bp, Homo sapiens
aatgggacaayaatgagtgac

SEQ ID NO: 6572 - DNA, 21 bp, Homo sapiens
ccagtagtcayctttctgggc

SEQ ID NO: 6573 - DNA, 21 bp, Homo sapiens
gaatacatgcracggcacatc

SEQ ID NO: 6574 - DNA, 21 bp, Homo sapiens
accgtgcagcyacagctcaaa

SEQ ID NO: 6575 - DNA, 21 bp, Homo sapiens
ttccttttttwaaatttattt

SEQ ID NO: 6576 - DNA, 21 bp, Homo sapiens
ttatgtttttwaagtaaaaac

SEQ ID NO: 6577 - DNA, 21 bp, Homo sapiens
atcttgtatcrttgattggat

SEQ ID NO: 6578 - DNA, 21 bp, Homo sapiens
ggtgctggcarcccagaaagc

SEQ ID NO: 6579 - DNA, 21 bp, Homo sapiens
atgctcttttygtgcaccttt

SEQ ID NO: 6580 - DNA, 21 bp, Homo sapiens
ttggactgtcyggttattgtc

SEQ ID NO: 6581 - DNA, 21 bp, Homo sapiens
gagttgagtakgttttcctac

SEQ ID NO: 6582 - DNA, 21 bp, Homo sapiens
aattctgaacrgggccagatc

SEQ ID NO: 6583 - DNA, 21 bp, Homo sapiens
tgcattggcawcctcagacga

SEQ ID NO: 6584 - DNA, 21 bp, Homo sapiens
gctaatgtaaytttggccaca

SEQ ID NO: 6585 - DNA, 21 bp, Homo sapiens
aagatcgagtkcttccaaaga

SEQ ID NO: 6586 - DNA, 21 bp, Homo sapiens
ataattacttygagatttatc

SEQ ID NO: 6587 - DNA, 21 bp, Homo sapiens
tatgagtaccytcgtaattac

SEQ ID NO: 6588 - DNA, 21 bp, Homo sapiens
tattattaatrtgttttgctt

SEQ ID NO: 6589 - DNA, 21 bp, Homo sapiens
caggtaagaayaagaaaacca

SEQ ID NO: 6590 - DNA, 21 bp, Homo sapiens
gaagttcaggmagggatgtca

SEQ ID NO: 6591 - DNA, 21 bp, Homo sapiens
gacacatactrtgcactcagt

SEQ ID NO: 6592 - DNA, 21 bp, Homo sapiens
gtcctgccagyctcctttcag

SEQ ID NO: 6593 - DNA, 21 bp, Homo sapiens
tatcaaatatwcgaaggtgat

SEQ ID NO: 6594 - DNA, 21 bp, Homo sapiens
ggctagtcacmcaccctgatc

SEQ ID NO: 6595 - DNA, 21 bp, Homo sapiens
gtgaaacagcrttatcacata

SEQ ID NO: 6596 - DNA, 21 bp, Homo sapiens
gaaacagcatyatcacatacc

SEQ ID NO: 6597 - DNA, 21 bp, Homo sapiens
gtatcctggcrtagtgacaat

SEQ ID NO: 6598 - DNA, 21 bp, Homo sapiens
gctcatggagwgtaaataact

SEQ ID NO: 6599 - DNA, 21 bp, Homo sapiens
agcgagagctrcagatgttca

SEQ ID NO: 6600 - DNA, 21 bp, Homo sapiens
gagccacattyacccagaatc

SEQ ID NO: 6601 - DNA, 21 bp, Homo sapiens
cagtgcagcargtgctgagag

SEQ ID NO: 6602 - DNA, 21 bp, Homo sapiens
gagccttgtgmatgggccggg

SEQ ID NO: 6603 - DNA, 21 bp, Homo sapiens
catggagcaargagagctgga

SEQ ID NO: 6604 - DNA, 21 bp, Homo sapiens
gaccagctccytgtgcctgcc

SEQ ID NO: 6605 - DNA, 21 bp, Homo sapiens
ttgttccagcrtcccccacaa

SEQ ID NO: 6606 - DNA, 21 bp, Homo sapiens
cacgctgggcwctggggcata

SEQ ID NO: 6607 - DNA, 21 bp, Homo sapiens
atcgttacagrcttgggttat

SEQ ID NO: 6608 - DNA, 21 bp, Homo sapiens
ccttccctctyagcatgtttc

SEQ ID NO: 6609 - DNA, 21 bp, Homo sapiens
aaacacaggayctcttttctt

SEQ ID NO: 6610 - DNA, 21 bp, Homo sapiens
aaggtagaagkaggtgaagca

SEQ ID NO: 6611 - DNA, 21 bp, Homo sapiens
caggggaggaygctgcatcac

SEQ ID NO: 6612 - DNA, 21 bp, Homo sapiens
gttgacatctkatgggttcct

SEQ ID NO: 6613 - DNA, 21 bp, Homo sapiens
cagtgtagtcrgtcttcagac

SEQ ID NO: 6614 - DNA, 21 bp, Homo sapiens
tgtcctcttaygttcagtgac

SEQ ID NO: 6615 - DNA, 21 bp, Homo sapiens
gtcaccatatrgcagcttgcc

SEQ ID NO: 6616 - DNA, 21 bp, Homo sapiens
cgtgagtcagmctcccagggc

SEQ ID NO: 6617 - DNA, 21 bp, Homo sapiens
catgcaacccragcggaagtg

SEQ ID NO: 6618 - DNA, 21 bp, Homo sapiens
cagagagagayaggactcagt

SEQ ID NO: 6619 - DNA, 21 bp, Homo sapiens
gggatgagggrtttcagagca

SEQ ID NO: 6620 - DNA, 21 bp, Homo sapiens
caagtcatgarccctggacaa

SEQ ID NO: 6621 - DNA, 21 bp, Homo sapiens
agacagggaamatccatcttg

SEQ ID NO: 6622 - DNA, 21 bp, Homo sapiens
agccctctgcmagtagctgct

SEQ ID NO: 6623 - DNA, 21 bp, Homo sapiens
gacacagagayggcctgcacc

SEQ ID NO: 6624 - DNA, 21 bp, Homo sapiens
caaacccaggytctcactcta

SEQ ID NO: 6625 - DNA, 21 bp, Homo sapiens
ccccgagagcytggtcccaca

SEQ ID NO: 6626 - DNA, 21 bp, Homo sapiens
ctgttctgttytctcccgaga

SEQ ID NO: 6627 - DNA, 21 bp, Homo sapiens
gaaaaaagaayctgctgacag

SEQ ID NO: 6628 - DNA, 21 bp, Homo sapiens
gccctctcctrcttcccacct

SEQ ID NO: 6629 - DNA, 21 bp, Homo sapiens
ggagtgaaccrctgcctgacg

SEQ ID NO: 6630 - DNA, 21 bp, Homo sapiens
catccatgccratgcttctgc

SEQ ID NO: 6631 - DNA, 21 bp, Homo sapiens
ttacaggtccyaattccttcg

SEQ ID NO: 6632 - DNA, 21 bp, Homo sapiens
agctcagctcmctctctggac

SEQ ID NO: 6633 - DNA, 21 bp, Homo sapiens
catcctaatcsccggaacctg

SEQ ID NO: 6634 - DNA, 21 bp, Homo sapiens
tatccatatcratagctatcc

SEQ ID NO: 6635 - DNA, 21 bp, Homo sapiens
gcctgatggamtatcacctgc

SEQ ID NO: 6636 - DNA, 21 bp, Homo sapiens
aaaaagcaaasggtaaacagt

SEQ ID NO: 6637 - DNA, 21 bp, Homo sapiens
gcgggggaaasgagaatgggg

SEQ ID NO: 6638 - DNA, 21 bp, Homo sapiens
gctaattaatrgtgtcattca

SEQ ID NO: 6639 - DNA, 21 bp, Homo sapiens
actagagcacsaggttataac

SEQ ID NO: 6640 - DNA, 21 bp, Homo sapiens
gctgaggttcwcgcctaccag

SEQ ID NO: 6641 - DNA, 21 bp, Homo sapiens
gcaggcttttyaattaacgaa

SEQ ID NO: 6642 - DNA, 21 bp, Homo sapiens
taaattattgrgaacggctaa

SEQ ID NO: 6643 - DNA, 21 bp, Homo sapiens
ccaacaaaaaygtgcaaagga

SEQ ID NO: 6644 - DNA, 21 bp, Homo sapiens
agttggtagcmcttgaccttc

SEQ ID NO: 6645 - DNA, 21 bp, Homo sapiens
agcagacacayagtcctttgc

SEQ ID NO: 6646 - DNA, 21 bp, Homo sapiens
caccccgttamctgcactgcc

SEQ ID NO: 6647 - DNA, 21 bp, Homo sapiens
tggtcagcctycaatccctct

SEQ ID NO: 6648 - DNA, 21 bp, Homo sapiens
tatttctcccycaagttccag

SEQ ID NO: 6649 - DNA, 21 bp, Homo sapiens
atctttcttcrgaattcaaat

SEQ ID NO: 6650 - DNA, 21 bp, Homo sapiens
cttctgcaaamcgccctgtta

SEQ ID NO: 6651 - DNA, 21 bp, Homo sapiens
atgcactgcascagctctcca

SEQ ID NO: 6652 - DNA, 21 bp, Homo sapiens
tgaggaggggkctggtgtgtc

SEQ ID NO: 6653 - DNA, 21 bp, Homo sapiens
agtgaaatacrctggctcccc

SEQ ID NO: 6654 - DNA, 21 bp, Homo sapiens
agagagagccraatcagttga

SEQ ID NO: 6655 - DNA, 21 bp, Homo sapiens
tgcctttccayctggacttat

SEQ ID NO: 6656 - DNA, 21 bp, Homo sapiens
catgatagaartgtggacaga

SEQ ID NO: 6657 - DNA, 21 bp, Homo sapiens
ttagtggtctrcatgagacaa

SEQ ID NO: 6658 - DNA, 21 bp, Homo sapiens
tctatgataayagtagaagac

SEQ ID NO: 6659 - DNA, 21 bp, Homo sapiens
tgactaaatgrgatttacttc

SEQ ID NO: 6660 - DNA, 21 bp, Homo sapiens
tttggaaataragaaaaataa

SEQ ID NO: 6661 - DNA, 21 bp, Homo sapiens
aataaggcacrgatagacaaa

SEQ ID NO: 6662 - DNA, 21 bp, Homo sapiens
cagaggtggargaaaatccac

SEQ ID NO: 6663 - DNA, 21 bp, Homo sapiens
aactgtgccayctcattgtcc

SEQ ID NO: 6664 - DNA, 21 bp, Homo sapiens
tggaagcctcrtgaatgggac

SEQ ID NO: 6665 - DNA, 21 bp, Homo sapiens
ataagcattgrttaccatttc

SEQ ID NO: 6666 - DNA, 21 bp, Homo sapiens
gagcctaatcrcctcttaaag

SEQ ID NO: 6667 - DNA, 21 bp, Homo sapiens
gcctttccccmaccaggccca

SEQ ID NO: 6668 - DNA, 21 bp, Homo sapiens
atggcaccagrgttggagaac

SEQ ID NO: 6669 - DNA, 21 bp, Homo sapiens
tttcagagcayttctttattt

SEQ ID NO: 6670 - DNA, 21 bp, Homo sapiens
caagttccctmaacagcagca

SEQ ID NO: 6671 - DNA, 21 bp, Homo sapiens
agggaaaagcmgtgggcaatt

SEQ ID NO: 6672 - DNA, 21 bp, Homo sapiens
gtagagaaacyctgctctgaa

SEQ ID NO: 6673 - DNA, 21 bp, Homo sapiens
ctgttgccacyactgatgccc

SEQ ID NO: 6674 - DNA, 21 bp, Homo sapiens
taccctccagwgattgctggg

SEQ ID NO: 6675 - DNA, 21 bp, Homo sapiens
taaaggggagygtgggccacg

SEQ ID NO: 6676 - DNA, 21 bp, Homo sapiens
ctgagagaagyacaggagaca

SEQ ID NO: 6677 - DNA, 21 bp, Homo sapiens
ccaagacagaygctggttttg

SEQ ID NO: 6678 - DNA, 21 bp, Homo sapiens
gtctcctgccrtcttggctca

SEQ ID NO: 6679 - DNA, 21 bp, Homo sapiens
tggtgccaatrtctctaaaag

SEQ ID NO: 6680 - DNA, 21 bp, Homo sapiens
cctaaaaaatrgcaagaagga

SEQ ID NO: 6681 - DNA, 21 bp, Homo sapiens
attgtgttaaytataattccc

SEQ ID NO: 6682 - DNA, 21 bp, Homo sapiens
ttcctgcctcytctcccagag

SEQ ID NO: 6683 - DNA, 21 bp, Homo sapiens
ttcatatcacstgtgactgtt

SEQ ID NO: 6684 - DNA, 21 bp, Homo sapiens
ttgctactgtrgataatgctg

SEQ ID NO: 6685 - DNA, 21 bp, Homo sapiens
gcttcagttcmgaggtgacat

SEQ ID NO: 6686 - DNA, 21 bp, Homo sapiens
ctgccaaacayattacatcag

SEQ ID NO: 6687 - DNA, 21 bp, Homo sapiens
acttggagtgkccagatctct

SEQ ID NO: 6688 - DNA, 21 bp, Homo sapiens
taactcaaagraatggcaggt

SEQ ID NO: 6689 - DNA, 21 bp, Homo sapiens
cagagggaaayttgagggagt

SEQ ID NO: 6690 - DNA, 21 bp, Homo sapiens
gagaaaaaacrgcatacttaa

SEQ ID NO: 6691 - DNA, 21 bp, Homo sapiens
agaattttttyccatgacata

SEQ ID NO: 6692 - DNA, 21 bp, Homo sapiens
cttatagcagraaggaattct

SEQ ID NO: 6693 - DNA, 21 bp, Homo sapiens
agtttattccrtaaataacag

SEQ ID NO: 6694 - DNA, 21 bp, Homo sapiens
tgtcctatgayacatctattt

SEQ ID NO: 6695 - DNA, 21 bp, Homo sapiens
tgtttcagccyttgagacacc

SEQ ID NO: 6696 - DNA, 21 bp, Homo sapiens
atatagaatawgtttcagccc

SEQ ID NO: 6697 - DNA, 21 bp, Homo sapiens
ggggtcccagragccccttct

SEQ ID NO: 6698 - DNA, 21 bp, Homo sapiens
ctctggataayagaattctag

SEQ ID NO: 6699 - DNA, 21 bp, Homo sapiens
cctaattctayagtattctta

SEQ ID NO: 6700 - DNA, 21 bp, Homo sapiens
gataaaacatygtaccttcta

SEQ ID NO: 6701 - DNA, 21 bp, Homo sapiens
aggtgaaatgmctgtgagtca

SEQ ID NO: 6702 - DNA, 21 bp, Homo sapiens
aaagctccagkcaagttaagc

SEQ ID NO: 6703 - DNA, 21 bp, Homo sapiens
tgtggtaaaarcttaaaattt

SEQ ID NO: 6704 - DNA, 21 bp, Homo sapiens
accacagaaakggagaaaaat

SEQ ID NO: 6705 - DNA, 21 bp, Homo sapiens
ccttactcaaytgagaaaatt

SEQ ID NO: 6706 - DNA, 21 bp, Homo sapiens
gagcaacctcmaatttacaat

SEQ ID NO: 6707 - DNA, 21 bp, Homo sapiens
ctacgtctaaktattataaaa

SEQ ID NO: 6708 - DNA, 21 bp, Homo sapiens
ccactgacctsagaacagcaa

SEQ ID NO: 6709 - DNA, 21 bp, Homo sapiens
aataactgttktaaaaacata

SEQ ID NO: 6710 - DNA, 21 bp, Homo sapiens
aacagacatcmtataaactta

SEQ ID NO: 6711 - DNA, 21 bp, Homo sapiens
catattttttsaccataagtt

SEQ ID NO: 6712 - DNA, 21 bp, Homo sapiens
taaacctcaartatttaaaat

SEQ ID NO: 6713 - DNA, 21 bp, Homo sapiens
aacagataagytacaatttga

SEQ ID NO: 6714 - DNA, 21 bp, Homo sapiens
aatattttatktgaaaagtca

SEQ ID NO: 6715 - DNA, 21 bp, Homo sapiens
acttgtacaayttgtttttga

SEQ ID NO: 6716 - DNA, 21 bp, Homo sapiens
ttgtttgtgtsctgtggacac

SEQ ID NO: 6717 - DNA, 21 bp, Homo sapiens
tacctgttagraaatgtttac

SEQ ID NO: 6718 - DNA, 21 bp, Homo sapiens
gcctgacacayagtacgtgtt

SEQ ID NO: 6719 - DNA, 21 bp, Homo sapiens
aggcaatgccraaggaaacta

SEQ ID NO: 6720 - DNA, 21 bp, Homo sapiens
catctaagacyatacctagaa

SEQ ID NO: 6721 - DNA, 21 bp, Homo sapiens
tatcaatgcaytgcccaagag

SEQ ID NO: 6722 - DNA, 21 bp, Homo sapiens
aatcttttacraacccaaaca

SEQ ID NO: 6723 - DNA, 21 bp, Homo sapiens
gaactcctaaytccactatat

SEQ ID NO: 6724 - DNA, 21 bp, Homo sapiens
ctttagatagmtggattattc

SEQ ID NO: 6725 - DNA, 21 bp, Homo sapiens
acgacttgctrgaaagagggt

SEQ ID NO: 6726 - DNA, 21 bp, Homo sapiens
tacttacccgrataattaacc

SEQ ID NO: 6727 - DNA, 21 bp, Homo sapiens
tgtctttcccrttcttactga

SEQ ID NO: 6728 - DNA, 21 bp, Homo sapiens
ttgctccaacrttttctggtc

SEQ ID NO: 6729 - DNA, 21 bp, Homo sapiens
catgttgcttktaagaacaaa

SEQ ID NO: 6730 - DNA, 21 bp, Homo sapiens
cctttagctcrgtgaagttcg

SEQ ID NO: 6731 - DNA, 21 bp, Homo sapiens
aaagaactacrtgcaggcacc

SEQ ID NO: 6732 - DNA, 21 bp, Homo sapiens
cttggatttasataaagaaat

SEQ ID NO: 6733 - DNA, 21 bp, Homo sapiens
ctccactgaastccctaagaa

SEQ ID NO: 6734 - DNA, 21 bp, Homo sapiens
tggtttaattrgataataaat

SEQ ID NO: 6735 - DNA, 21 bp, Homo sapiens
atctcaacaaygacaccactg

SEQ ID NO: 6736 - DNA, 21 bp, Homo sapiens
tgagaaccgasgtctaatgcc

SEQ ID NO: 6737 - DNA, 21 bp, Homo sapiens
tgaagttagamtctcttggcc

SEQ ID NO: 6738 - DNA, 21 bp, Homo sapiens
acaggatatcyttaaagagat

SEQ ID NO: 6739 - DNA, 21 bp, Homo sapiens
acatcccatgstcccctttgt

SEQ ID NO: 6740 - DNA, 21 bp, Homo sapiens
ttatttaactstcctgcccag

SEQ ID NO: 6741 - DNA, 21 bp, Homo sapiens
ggaaacacttycctaagatac

SEQ ID NO: 6742 - DNA, 21 bp, Homo sapiens
ctaatgggaaygggacgtgag

SEQ ID NO: 6743 - DNA, 21 bp, Homo sapiens
ctgaattatgrtatcaatttt

SEQ ID NO: 6744 - DNA, 21 bp, Homo sapiens
tgcagattgtrtcatgtttcc

SEQ ID NO: 6745 - DNA, 21 bp, Homo sapiens
ggaagctcctwaggggtagag

SEQ ID NO: 6746 - DNA, 21 bp, Homo sapiens
gagcaactgcraataattccc

SEQ ID NO: 6747 - DNA, 21 bp, Homo sapiens
ttttatttttwttttttaaag

SEQ ID NO: 6748 - DNA, 21 bp, Homo sapiens
gaatgggagcrgacccctgat

SEQ ID NO: 6749 - DNA, 21 bp, Homo sapiens
gtacaggccayatgaagtccc

SEQ ID NO: 6750 - DNA, 21 bp, Homo sapiens
acctcatgctrtggactgaac

SEQ ID NO: 6751 - DNA, 21 bp, Homo sapiens
accaaactcarcaagagggcc

SEQ ID NO: 6752 - DNA, 21 bp, Homo sapiens
cacactggctktagggaaatg

SEQ ID NO: 6753 - DNA, 21 bp, Homo sapiens
ataatcatcaktgttctgtga

SEQ ID NO: 6754 - DNA, 21 bp, Homo sapiens
cccaattcacyggaagacagg

SEQ ID NO: 6755 - DNA, 21 bp, Homo sapiens
gcatgccgacyggaggaccaa

SEQ ID NO: 6756 - DNA, 21 bp, Homo sapiens
ctcagccagayggtggaggtc

SEQ ID NO: 6757 - DNA, 21 bp, Homo sapiens
aggtaaaaagyaacggctgac

SEQ ID NO: 6758 - DNA, 21 bp, Homo sapiens
attcaataacrttccactaaa

SEQ ID NO: 6759 - DNA, 21 bp, Homo sapiens
ggccatttctkaagcttcaga

SEQ ID NO: 6760 - DNA, 21 bp, Homo sapiens
agcccccagcscgccaacagg

SEQ ID NO: 6761 - DNA, 21 bp, Homo sapiens
gaacacggctrcaactgtgag

SEQ ID NO: 6762 - DNA, 21 bp, Homo sapiens
aagcagtggcytctgaacttt

SEQ ID NO: 6763 - DNA, 21 bp, Homo sapiens
ctctgctatgrtttgaatgtg

SEQ ID NO: 6764 - DNA, 21 bp, Homo sapiens
catccctctgytccacggtta

SEQ ID NO: 6765 - DNA, 21 bp, Homo sapiens
gatctcatacratcactatta

SEQ ID NO: 6766 - DNA, 21 bp, Homo sapiens
tggggaactayctcaaactct

SEQ ID NO: 6767 - DNA, 21 bp, Homo sapiens
cagaatttcaytcatgctttc

SEQ ID NO: 6768 - DNA, 21 bp, Homo sapiens
cagaagctttygctagttacc

SEQ ID NO: 6769 - DNA, 21 bp, Homo sapiens
ttcatccactygtctagaggg

SEQ ID NO: 6770 - DNA, 21 bp, Homo sapiens
aatgaaacaarcatttcttta

SEQ ID NO: 6771 - DNA, 21 bp, Homo sapiens
tcagggcggcyggaggacagt

SEQ ID NO: 6772 - DNA, 21 bp, Homo sapiens
aattgggataygactataaga

SEQ ID NO: 6773 - DNA, 21 bp, Homo sapiens
tattttctctyaccacacata

SEQ ID NO: 6774 - DNA, 21 bp, Homo sapiens
ttttttttttwaaaaaagggg

SEQ ID NO: 6775 - DNA, 21 bp, Homo sapiens
atggcaaaaaygtgcaaatga

SEQ ID NO: 6776 - DNA, 21 bp, Homo sapiens
tctataatttyatcaattaga

SEQ ID NO: 6777 - DNA, 21 bp, Homo sapiens
agactaagacrttctctatga

SEQ ID NO: 6778 - DNA, 21 bp, Homo sapiens
aacagaagagyacaaactggc

SEQ ID NO: 6779 - DNA, 21 bp, Homo sapiens
cagtactaaaktcctatacta

SEQ ID NO: 6780 - DNA, 21 bp, Homo sapiens
gttaggtccaygttctcactc

SEQ ID NO: 6781 - DNA, 21 bp, Homo sapiens
agtctaccaargaagtgctaa

SEQ ID NO: 6782 - DNA, 21 bp, Homo sapiens
cagaattcaarctgatcccaa

SEQ ID NO: 6783 - DNA, 21 bp, Homo sapiens
ttgcaccaatmtaataattta

SEQ ID NO: 6784 - DNA, 21 bp, Homo sapiens
agaattttagycagagtttaa

SEQ ID NO: 6785 - DNA, 21 bp, Homo sapiens
gctccacaccytattaccaat

SEQ ID NO: 6786 - DNA, 21 bp, Homo sapiens
tagtatctcayagagcaatcc

SEQ ID NO: 6787 - DNA, 21 bp, Homo sapiens
gttggttacasagcaatagat

SEQ ID NO: 6788 - DNA, 21 bp, Homo sapiens
atcatcttggkccacagggcc

SEQ ID NO: 6789 - DNA, 21 bp, Homo sapiens
tacatacacasaaaaggcctg

SEQ ID NO: 6790 - DNA, 21 bp, Homo sapiens
cagaagtttgyagaaaatgct

SEQ ID NO: 6791 - DNA, 21 bp, Homo sapiens
caaaatccaamcacaatgtaa

SEQ ID NO: 6792 - DNA, 21 bp, Homo sapiens
tcttatctttrtgctttcctg

SEQ ID NO: 6793 - DNA, 21 bp, Homo sapiens
cctcctgtggyaggtttaggc

SEQ ID NO: 6794 - DNA, 21 bp, Homo sapiens
tgatctttgcrcagaacctat

SEQ ID NO: 6795 - DNA, 21 bp, Homo sapiens
taaaaagtagyaatacatagg

SEQ ID NO: 6796 - DNA, 21 bp, Homo sapiens
taattcaagtraggatatgaa

SEQ ID NO: 6797 - DNA, 21 bp, Homo sapiens
cttctgtcaarctttttagac

SEQ ID NO: 6798 - DNA, 21 bp, Homo sapiens
atggcaaaaaractagaagac

SEQ ID NO: 6799 - DNA, 21 bp, Homo sapiens
tgcctgcagtstgacactgat

SEQ ID NO: 6800 - DNA, 21 bp, Homo sapiens
ataatattcartactctgagg

SEQ ID NO: 6801 - DNA, 21 bp, Homo sapiens
cttttagggtratacagagat

SEQ ID NO: 6802 - DNA, 21 bp, Homo sapiens
attagtggtaygtataagggc

SEQ ID NO: 6803 - DNA, 21 bp, Homo sapiens
ttctgtaaggkcagtattaat

SEQ ID NO: 6804 - DNA, 21 bp, Homo sapiens
cagcaaaactwtttatacatc

SEQ ID NO: 6805 - DNA, 21 bp, Homo sapiens
cctgttttctyatctgtagaa

SEQ ID NO: 6806 - DNA, 21 bp, Homo sapiens
actttaggtcrgtagatttct

SEQ ID NO: 6807 - DNA, 21 bp, Homo sapiens
ctctaattttyaaatagagta

SEQ ID NO: 6808 - DNA, 21 bp, Homo sapiens
tttcttatcartgggccctct

SEQ ID NO: 6809 - DNA, 21 bp, Homo sapiens
aatttggagcyatctcacaac

SEQ ID NO: 6810 - DNA, 21 bp, Homo sapiens
tacaaacactrtggaaaacag

SEQ ID NO: 6811 - DNA, 21 bp, Homo sapiens
tgtcccccccmaccccccgga

SEQ ID NO: 6812 - DNA, 21 bp, Homo sapiens
tattttatcawgaaggccttt

SEQ ID NO: 6813 - DNA, 21 bp, Homo sapiens
agaattcatayacaaacccca

SEQ ID NO: 6814 - DNA, 21 bp, Homo sapiens
tattctcctakagttgagtgt

SEQ ID NO: 6815 - DNA, 21 bp, Homo sapiens
ttgttaatgartgggtgaaag

SEQ ID NO: 6816 - DNA, 21 bp, Homo sapiens
gcacttgtagkccagcttcta

SEQ ID NO: 6817 - DNA, 21 bp, Homo sapiens
ccttgcaaggygaaggctctt

SEQ ID NO: 6818 - DNA, 21 bp, Homo sapiens
aggcagaaccrttgtttcaga

SEQ ID NO: 6819 - DNA, 21 bp, Homo sapiens
tggttgcacargtgtatgtat

SEQ ID NO: 6820 - DNA, 21 bp, Homo sapiens
caggggtggcrctggcagcag

SEQ ID NO: 6821 - DNA, 21 bp, Homo sapiens
ctaactcaaaytggttttggg

SEQ ID NO: 6822 - DNA, 21 bp, Homo sapiens
ataatttcctyctttccaatg

SEQ ID NO: 6823 - DNA, 21 bp, Homo sapiens
aatggatttgyaacttccaga

SEQ ID NO: 6824 - DNA, 21 bp, Homo sapiens
aataaggagcygactgaataa

SEQ ID NO: 6825 - DNA, 21 bp, Homo sapiens
tttgtagacargtatgtgaaa

SEQ ID NO: 6826 - DNA, 21 bp, Homo sapiens
atagtggtagwttctgtcctg

SEQ ID NO: 6827 - DNA, 21 bp, Homo sapiens
gtggtatgtgytagcatgtta

SEQ ID NO: 6828 - DNA, 21 bp, Homo sapiens
tgatgctttcytatgagttgg

SEQ ID NO: 6829 - DNA, 21 bp, Homo sapiens
aaaggctgcartttagtactt

SEQ ID NO: 6830 - DNA, 21 bp, Homo sapiens
ttaaaacagawcatgtaagtt

SEQ ID NO: 6831 - DNA, 21 bp, Homo sapiens
cacagcaatgygaagtgaata

SEQ ID NO: 6832 - DNA, 21 bp, Homo sapiens
tcacatattcyggggactgtt

SEQ ID NO: 6833 - DNA, 21 bp, Homo sapiens
tcaatttaatrtaaggatttg

SEQ ID NO: 6834 - DNA, 21 bp, Homo sapiens
gtcctggaggwcctccgggat

SEQ ID NO: 6835 - DNA, 21 bp, Homo sapiens
cggtgcagccrcccatattcg

SEQ ID NO: 6836 - DNA, 21 bp, Homo sapiens
agtgctaacasgtcaataata

SEQ ID NO: 6837 - DNA, 21 bp, Homo sapiens
aaaacaacaayaacgaaaacc

SEQ ID NO: 6838 - DNA, 21 bp, Homo sapiens
gtatgacaatrattctgttga

SEQ ID NO: 6839 - DNA, 21 bp, Homo sapiens
gcttacaactmggcaaacatc

SEQ ID NO: 6840 - DNA, 21 bp, Homo sapiens
ctaaaatattyactacttggc

SEQ ID NO: 6841 - DNA, 21 bp, Homo sapiens
tttctatccayagttggttag

SEQ ID NO: 6842 - DNA, 21 bp, Homo sapiens
cgtatgttgasagtgcactaa

SEQ ID NO: 6843 - DNA, 21 bp, Homo sapiens
tatgttgacartgcactaaag

SEQ ID NO: 6844 - DNA, 21 bp, Homo sapiens
gaattatagcygcaggttctc

SEQ ID NO: 6845 - DNA, 21 bp, Homo sapiens
ataaaaataascatgaaaata

SEQ ID NO: 6846 - DNA, 21 bp, Homo sapiens
ggtcattttgkttgggcagaa

SEQ ID NO: 6847 - DNA, 21 bp, Homo sapiens
gatctccaagrcaaagaacaa

SEQ ID NO: 6848 - DNA, 21 bp, Homo sapiens
gggtgtccctyaccttccctg

SEQ ID NO: 6849 - DNA, 21 bp, Homo sapiens
gtgcgtaaggraaatagcagg

SEQ ID NO: 6850 - DNA, 21 bp, Homo sapiens
aagattgaaartcacttatga

SEQ ID NO: 6851 - DNA, 21 bp, Homo sapiens
cccctgccatmctggttgcaa

SEQ ID NO: 6852 - DNA, 21 bp, Homo sapiens
tcttctatgaygcatgtatgt

SEQ ID NO: 6853 - DNA, 21 bp, Homo sapiens
aagatggcacmagtgatctat

SEQ ID NO: 6854 - DNA, 21 bp, Homo sapiens
attaataatgmcataaactcc

SEQ ID NO: 6855 - DNA, 21 bp, Homo sapiens
tctttccagcyagtgtcctta

SEQ ID NO: 6856 - DNA, 21 bp, Homo sapiens
ggcattcaacyaaatgcagtc

SEQ ID NO: 6857 - DNA, 21 bp, Homo sapiens
gcatgagcatytttcattgtc

SEQ ID NO: 6858 - DNA, 21 bp, Homo sapiens
aactgttaaawaaagaaaaaa

SEQ ID NO: 6859 - DNA, 21 bp, Homo sapiens
gaatatttgtrttattggagt

SEQ ID NO: 6860 - DNA, 21 bp, Homo sapiens
tctctgtaatmaaagaagtat

SEQ ID NO: 6861 - DNA, 21 bp, Homo sapiens
gattcccccckcccccaattt

SEQ ID NO: 6862 - DNA, 21 bp, Homo sapiens
gtgggctgggrcctaatacag

SEQ ID NO: 6863 - DNA, 21 bp, Homo sapiens
ttgttgggtcyggctgtctga

SEQ ID NO: 6864 - DNA, 21 bp, Homo sapiens
ccatggccttrgcctgtctgc

SEQ ID NO: 6865 - DNA, 21 bp, Homo sapiens
ggataattggrgattgctcaa

SEQ ID NO: 6866 - DNA, 21 bp, Homo sapiens
tggatggaccrgaaatttatt

SEQ ID NO: 6867 - DNA, 21 bp, Homo sapiens
acatggcggayactggggaag

SEQ ID NO: 6868 - DNA, 21 bp, Homo sapiens
aatataagcayagagatgggt

SEQ ID NO: 6869 - DNA, 21 bp, Homo sapiens
ttgcacaggargtggtgggag

SEQ ID NO: 6870 - DNA, 21 bp, Homo sapiens
ttgattcacaygagcgcgaca

SEQ ID NO: 6871 - DNA, 21 bp, Homo sapiens
ggtgttttatycgcatacaaa

SEQ ID NO: 6872 - DNA, 21 bp, Homo sapiens
cagggaaggayagagagatgc

SEQ ID NO: 6873 - DNA, 21 bp, Homo sapiens
accggctgccrgacacctctc

SEQ ID NO: 6874 - DNA, 21 bp, Homo sapiens
aacgatgaccsagaggctctt

SEQ ID NO: 6875 - DNA, 21 bp, Homo sapiens
cacacaggctstttaaggtaa

SEQ ID NO: 6876 - DNA, 21 bp, Homo sapiens
cttaccatccytcatgatcca

SEQ ID NO: 6877 - DNA, 21 bp, Homo sapiens
gaaatccccamatttgagatt

SEQ ID NO: 6878 - DNA, 21 bp, Homo sapiens
cagcttcccaytgacagagcc

SEQ ID NO: 6879 - DNA, 21 bp, Homo sapiens
ccatcctcccytatcctcctc

SEQ ID NO: 6880 - DNA, 21 bp, Homo sapiens
cctgccaccgrcgcctccttc

SEQ ID NO: 6881 - DNA, 21 bp, Homo sapiens
acaccgggagwtgccaaaggg

SEQ ID NO: 6882 - DNA, 21 bp, Homo sapiens
gaggttcagcyccagattaga

SEQ ID NO: 6883 - DNA, 21 bp, Homo sapiens
gtctgaagccycttaccatgc

SEQ ID NO: 6884 - DNA, 21 bp, Homo sapiens
tgcagccagaragtctgaggt

SEQ ID NO: 6885 - DNA, 21 bp, Homo sapiens
catggagcagrgctgagatgc

SEQ ID NO: 6886 - DNA, 21 bp, Homo sapiens
ccagtatctayaagctctgtc

SEQ ID NO: 6887 - DNA, 21 bp, Homo sapiens
gagaggcacckggagtcctca

SEQ ID NO: 6888 - DNA, 21 bp, Homo sapiens
cacctaactastcccagactt

SEQ ID NO: 6889 - DNA, 21 bp, Homo sapiens
gctccccttgytcttgggggc

SEQ ID NO: 6890 - DNA, 21 bp, Homo sapiens
agtctggggtrggggagagga

SEQ ID NO: 6891 - DNA, 21 bp, Homo sapiens
ctctgaccccyggtggtcttg

SEQ ID NO: 6892 - DNA, 21 bp, Homo sapiens
agggtccctgyagacccagga

SEQ ID NO: 6893 - DNA, 21 bp, Homo sapiens
attctcttctstcatacccca

SEQ ID NO: 6894 - DNA, 21 bp, Homo sapiens
agtaaaactarggaaatttga

SEQ ID NO: 6895 - DNA, 21 bp, Homo sapiens
aggactaggartttccactgg

SEQ ID NO: 6896 - DNA, 21 bp, Homo sapiens
gccagtaaaayacccaagacc

SEQ ID NO: 6897 - DNA, 21 bp, Homo sapiens
aagtatcatcygtgctctggc

SEQ ID NO: 6898 - DNA, 21 bp, Homo sapiens
ctgtgttctcrgagcattttt

SEQ ID NO: 6899 - DNA, 21 bp, Homo sapiens
attataaaggyttctttggct

SEQ ID NO: 6900 - DNA, 21 bp, Homo sapiens
ttaaccacccygaggggagaa

SEQ ID NO: 6901 - DNA, 21 bp, Homo sapiens
cccttgccagyggtgatgata

SEQ ID NO: 6902 - DNA, 21 bp, Homo sapiens
atacttagttkctagccttaa

SEQ ID NO: 6903 - DNA, 21 bp, Homo sapiens
gaccaaatggrtaaaacagga

SEQ ID NO: 6904 - DNA, 21 bp, Homo sapiens
gctgatgactrtgcatctgta

SEQ ID NO: 6905 - DNA, 21 bp, Homo sapiens
gtaataaagtkaattaccaaa

SEQ ID NO: 6906 - DNA, 21 bp, Homo sapiens
aggcaggcagscctccttatg

SEQ ID NO: 6907 - DNA, 21 bp, Homo sapiens
gggcctctggyggcctgtagg

SEQ ID NO: 6908 - DNA, 21 bp, Homo sapiens
tgaatttgcastttgcaacta

SEQ ID NO: 6909 - DNA, 21 bp, Homo sapiens
acctcatggaygagaaaactg

SEQ ID NO: 6910 - DNA, 21 bp, Homo sapiens
cctatgggaawcaaagcactc

SEQ ID NO: 6911 - DNA, 21 bp, Homo sapiens
gtcactcagaraatcagcagg

SEQ ID NO: 6912 - DNA, 21 bp, Homo sapiens
gttttacagawagccactgag

SEQ ID NO: 6913 - DNA, 21 bp, Homo sapiens
acatgattctragaggactgg

SEQ ID NO: 6914 - DNA, 21 bp, Homo sapiens
ggacagtacgsctgtgctcca

SEQ ID NO: 6915 - DNA, 21 bp, Homo sapiens
ccacatgggcrtcccttccag

SEQ ID NO: 6916 - DNA, 21 bp, Homo sapiens
tagtttgcagyactccatatg

SEQ ID NO: 6917 - DNA, 21 bp, Homo sapiens
tttttgcctcytttttttact

SEQ ID NO: 6918 - DNA, 21 bp, Homo sapiens
tttttaaatargttattttta

SEQ ID NO: 6919 - DNA, 21 bp, Homo sapiens
tcttgagcccsttgaagtcat

SEQ ID NO: 6920 - DNA, 21 bp, Homo sapiens
gccttaaacartcgacgccag

SEQ ID NO: 6921 - DNA, 21 bp, Homo sapiens
caggatcaggyatactgggag

SEQ ID NO: 6922 - DNA, 21 bp, Homo sapiens
tgcgttaggawatggctccaa

SEQ ID NO: 6923 - DNA, 21 bp, Homo sapiens
tagagccagaygcttaagtcc

SEQ ID NO: 6924 - DNA, 21 bp, Homo sapiens
ggtccacatgytctttttcta

SEQ ID NO: 6925 - DNA, 21 bp, Homo sapiens
tggcagaccaytgaaatggca

SEQ ID NO: 6926 - DNA, 21 bp, Homo sapiens
atgcttggctraggctgaatt

SEQ ID NO: 6927 - DNA, 21 bp, Homo sapiens
agagggctttyaggacagaaa

SEQ ID NO: 6928 - DNA, 21 bp, Homo sapiens
ggagagaaatrgaaaatgact

SEQ ID NO: 6929 - DNA, 21 bp, Homo sapiens
cagtatgaccrtatgggcttt

SEQ ID NO: 6930 - DNA, 21 bp, Homo sapiens
gacttgattastaggcccaag

SEQ ID NO: 6931 - DNA, 21 bp, Homo sapiens
agagcggtaaygatggttcag

SEQ ID NO: 6932 - DNA, 21 bp, Homo sapiens
tgcaggagagsagagaactgc

SEQ ID NO: 6933 - DNA, 21 bp, Homo sapiens
ctaagcaacaytgcatctatt

SEQ ID NO: 6934 - DNA, 21 bp, Homo sapiens
ttgctattttrtactcccgga

SEQ ID NO: 6935 - DNA, 21 bp, Homo sapiens
gattccactcygcacaatccc

SEQ ID NO: 6936 - DNA, 21 bp, Homo sapiens
cccactaataytactgcacag

SEQ ID NO: 6937 - DNA, 21 bp, Homo sapiens
gcataccaggrgcaaagatca

SEQ ID NO: 6938 - DNA, 21 bp, Homo sapiens
agcccacccamagtgactaac

SEQ ID NO: 6939 - DNA, 21 bp, Homo sapiens
attgatcttaytgcataccag

SEQ ID NO: 6940 - DNA, 21 bp, Homo sapiens
tggggaaaggrccagccagca

SEQ ID NO: 6941 - DNA, 21 bp, Homo sapiens
agagcctaccsgcgagccgcg

SEQ ID NO: 6942 - DNA, 21 bp, Homo sapiens
ggactggtctratcattgcca

SEQ ID NO: 6943 - DNA, 21 bp, Homo sapiens
caagaagacamggggggtgca

SEQ ID NO: 6944 - DNA, 21 bp, Homo sapiens
ctgttcccagkggttgtaggt

SEQ ID NO: 6945 - DNA, 21 bp, Homo sapiens
gattcaacaargcatggatgg

SEQ ID NO: 6946 - DNA, 21 bp, Homo sapiens
cacctgccgcrgtcctcccgc

SEQ ID NO: 6947 - DNA, 21 bp, Homo sapiens
tctgtgtccartctgccagag

SEQ ID NO: 6948 - DNA, 21 bp, Homo sapiens
aaaatggctcygtatgctttc

SEQ ID NO: 6949 - DNA, 21 bp, Homo sapiens
acacaataggkgtgaatgaga

SEQ ID NO: 6950 - DNA, 21 bp, Homo sapiens
catatctccargtatgtgctg

SEQ ID NO: 6951 - DNA, 21 bp, Homo sapiens
aaaacttaacyatcttcaaag

SEQ ID NO: 6952 - DNA, 21 bp, Homo sapiens
aaaggtcctgygtctccccat

SEQ ID NO: 6953 - DNA, 21 bp, Homo sapiens
tgagtcttctscagggtgcta

SEQ ID NO: 6954 - DNA, 21 bp, Homo sapiens
ggcctcaaagyatttttctaa

SEQ ID NO: 6955 - DNA, 21 bp, Homo sapiens
ctgcccctctsggggaggacc

SEQ ID NO: 6956 - DNA, 21 bp, Homo sapiens
taggtatttcragaaatagga

SEQ ID NO: 6957 - DNA, 21 bp, Homo sapiens
cttgtgaacaragcacaccgg

SEQ ID NO: 6958 - DNA, 21 bp, Homo sapiens
tgcctccaggrtgttgtctat

SEQ ID NO: 6959 - DNA, 21 bp, Homo sapiens
acccatgatcstggagtgact

SEQ ID NO: 6960 - DNA, 21 bp, Homo sapiens
tcatagagaaytcttcgcttc

SEQ ID NO: 6961 - DNA, 21 bp, Homo sapiens
tgttttttctrttcacgtgtg

SEQ ID NO: 6962 - DNA, 21 bp, Homo sapiens
ctggtgatggycgttggactc

SEQ ID NO: 6963 - DNA, 21 bp, Homo sapiens
aagggaagcgrgcaggcaata

SEQ ID NO: 6964 - DNA, 21 bp, Homo sapiens
aatcctgttgyggccattgct

SEQ ID NO: 6965 - DNA, 21 bp, Homo sapiens
ttcttcccctyccgggtccaa

SEQ ID NO: 6966 - DNA, 21 bp, Homo sapiens
gttctcagaarcaaagcaaat

SEQ ID NO: 6967 - DNA, 21 bp, Homo sapiens
aggagcagctyggagtgcaca

SEQ ID NO: 6968 - DNA, 21 bp, Homo sapiens
ctcagtccttycatttggtgc

SEQ ID NO: 6969 - DNA, 21 bp, Homo sapiens
ccaagatcagyggcctttggt

SEQ ID NO: 6970 - DNA, 21 bp, Homo sapiens
agaagcaatartattcaggca

SEQ ID NO: 6971 - DNA, 21 bp, Homo sapiens
gagttcacagsggaaacacaa

SEQ ID NO: 6972 - DNA, 21 bp, Homo sapiens
ctgggcatatktctaggatct

SEQ ID NO: 6973 - DNA, 21 bp, Homo sapiens
agacaggaccktccttgttgc

SEQ ID NO: 6974 - DNA, 21 bp, Homo sapiens
tggatgttcartcaaccttgc

SEQ ID NO: 6975 - DNA, 21 bp, Homo sapiens
agggtgttccrtgtacatttg

SEQ ID NO: 6976 - DNA, 21 bp, Homo sapiens
tgagttctctrtttctttctc

SEQ ID NO: 6977 - DNA, 21 bp, Homo sapiens
ggcaccagctkggggaaggag

SEQ ID NO: 6978 - DNA, 21 bp, Homo sapiens
atataacacaytttttttacc

SEQ ID NO: 6979 - DNA, 21 bp, Homo sapiens
gctccctagaygctgagccct

SEQ ID NO: 6980 - DNA, 21 bp, Homo sapiens
acatgtgactrtgattgtggc

SEQ ID NO: 6981 - DNA, 21 bp, Homo sapiens
gggtcattcawtccacaaaca

SEQ ID NO: 6982 - DNA, 21 bp, Homo sapiens
gttagcaaagscaacatatgc

SEQ ID NO: 6983 - DNA, 21 bp, Homo sapiens
ccaagcccacytcccaggcgg

SEQ ID NO: 6984 - DNA, 21 bp, Homo sapiens
aacttttccayttggggaggt

SEQ ID NO: 6985 - DNA, 21 bp, Homo sapiens
tcttggccatsttaaaaatat

SEQ ID NO: 6986 - DNA, 21 bp, Homo sapiens
agggatcccaraggatataca

SEQ ID NO: 6987 - DNA, 21 bp, Homo sapiens
agctgctagtrtagtcacgct

SEQ ID NO: 6988 - DNA, 21 bp, Homo sapiens
tcagggacttmcatgccccac

SEQ ID NO: 6989 - DNA, 21 bp, Homo sapiens
gggtcctatgwttccaagtcc

SEQ ID NO: 6990 - DNA, 21 bp, Homo sapiens
ctttaccctcrcttattttgt

SEQ ID NO: 6991 - DNA, 21 bp, Homo sapiens
cctcttggccrtccctgggcc

SEQ ID NO: 6992 - DNA, 21 bp, Homo sapiens
agagcacttarcattaggtct

SEQ ID NO: 6993 - DNA, 21 bp, Homo sapiens
ttttctggcckggtgaaaagt

SEQ ID NO: 6994 - DNA, 21 bp, Homo sapiens
tccgcagcacrgcccgcaaga

SEQ ID NO: 6995 - DNA, 21 bp, Homo sapiens
cgtggccaaartaagaaaaga

SEQ ID NO: 6996 - DNA, 21 bp, Homo sapiens
ggcccagccarcaccaggacc

SEQ ID NO: 6997 - DNA, 21 bp, Homo sapiens
gcaaactgacrgaaggtatgc

SEQ ID NO: 6998 - DNA, 21 bp, Homo sapiens
gaggaggacgrctgcggtggg

SEQ ID NO: 6999 - DNA, 21 bp, Homo sapiens
gaagcaatagsgggcagcagg

SEQ ID NO: 7000 - DNA, 21 bp, Homo sapiens
gctgccatgtkcactggggtg

SEQ ID NO: 7001 - DNA, 21 bp, Homo sapiens
gctccaatccsgacccgcccg

SEQ ID NO: 7002 - DNA, 21 bp, Homo sapiens
ccctgtattaygtggacctca

SEQ ID NO: 7003 - DNA, 21 bp, Homo sapiens
tgtcacactcragaggctctg

SEQ ID NO: 7004 - DNA, 21 bp, Homo sapiens
agagcgtcgarggggctggga

SEQ ID NO: 7005 - DNA, 21 bp, Homo sapiens
atggcccccarccacgcgcag

SEQ ID NO: 7006 - DNA, 21 bp, Homo sapiens
tgtgatcattygggaacttgt

SEQ ID NO: 7007 - DNA, 21 bp, Homo sapiens
gcatccccagrgcaggcggag

SEQ ID NO: 7008 - DNA, 21 bp, Homo sapiens
tattcaaatgygattcttttc

SEQ ID NO: 7009 - DNA, 21 bp, Homo sapiens
tgcttttgagraaggctcctt

SEQ ID NO: 7010 - DNA, 21 bp, Homo sapiens
gagaatacctsttactctttc

SEQ ID NO: 7011 - DNA, 21 bp, Homo sapiens
tccgctccgtygtcttctttt

SEQ ID NO: 7012 - DNA, 21 bp, Homo sapiens
gtctagcaagrttgtgccagg

SEQ ID NO: 7013 - DNA, 21 bp, Homo sapiens
tcctcccttcyccagcttccc

SEQ ID NO: 7014 - DNA, 21 bp, Homo sapiens
aatagtctcaycagggtctct

SEQ ID NO: 7015 - DNA, 21 bp, Homo sapiens
agcaacacacwtctgtggggg

SEQ ID NO: 7016 - DNA, 21 bp, Homo sapiens
cgtggtcctgygtccagggcg

SEQ ID NO: 7017 - DNA, 21 bp, Homo sapiens
tcgagagctgyctcagcccct

SEQ ID NO: 7018 - DNA, 21 bp, Homo sapiens
ccatcctggarcctccacctt

SEQ ID NO: 7019 - DNA, 21 bp, Homo sapiens
ggccattggcrgatccaaagg

SEQ ID NO: 7020 - DNA, 21 bp, Homo sapiens
ggtatgagcasaacccaaatc

SEQ ID NO: 7021 - DNA, 21 bp, Homo sapiens
aaattaactaygtacaaaagg

SEQ ID NO: 7022 - DNA, 21 bp, Homo sapiens
tcaccttcagrgcaggacctt

SEQ ID NO: 7023 - DNA, 21 bp, Homo sapiens
ccacacctggyatcacttaac

SEQ ID NO: 7024 - DNA, 21 bp, Homo sapiens
aactactgtcygagaaggccg

SEQ ID NO: 7025 - DNA, 21 bp, Homo sapiens
agtccacaagmtctgcattcc

SEQ ID NO: 7026 - DNA, 21 bp, Homo sapiens
caggactactktaagagctag

SEQ ID NO: 7027 - DNA, 21 bp, Homo sapiens
ctagacttagkgactcattct

SEQ ID NO: 7028 - DNA, 21 bp, Homo sapiens
tgagacctccrttgctacaaa

SEQ ID NO: 7029 - DNA, 21 bp, Homo sapiens
aaccattttgkaaaaggtatt

SEQ ID NO: 7030 - DNA, 21 bp, Homo sapiens
gaggaggtagsctggagccag

SEQ ID NO: 7031 - DNA, 21 bp, Homo sapiens
ccgattctaasacactcctac

SEQ ID NO: 7032 - DNA, 21 bp, Homo sapiens
tcacagtttcragccctgagc

SEQ ID NO: 7033 - DNA, 21 bp, Homo sapiens
actgcaacacrggttggctcg

SEQ ID NO: 7034 - DNA, 21 bp, Homo sapiens
cttgccacctrgccaagctgg

SEQ ID NO: 7035 - DNA, 21 bp, Homo sapiens
gggaatatcarttggataggg

SEQ ID NO: 7036 - DNA, 21 bp, Homo sapiens
tctatcgtccrtcctctctgc

SEQ ID NO: 7037 - DNA, 21 bp, Homo sapiens
aaagtccacayggaagttgct

SEQ ID NO: 7038 - DNA, 21 bp, Homo sapiens
cgccctggcargggagcagtg

SEQ ID NO: 7039 - DNA, 21 bp, Homo sapiens
tctctgggtgycacactcacc

SEQ ID NO: 7040 - DNA, 21 bp, Homo sapiens
aataatgagamaagagaaggg

SEQ ID NO: 7041 - DNA, 21 bp, Homo sapiens
gcccttggggyccatgagaga

SEQ ID NO: 7042 - DNA, 21 bp, Homo sapiens
ggcacaccctkacccaggagg

SEQ ID NO: 7043 - DNA, 21 bp, Homo sapiens
ttctccttcarcctctgttca

SEQ ID NO: 7044 - DNA, 21 bp, Homo sapiens
ttggcctcatygctctatgtt

SEQ ID NO: 7045 - DNA, 21 bp, Homo sapiens
gcgcaaggagragagtgttgt

SEQ ID NO: 7046 - DNA, 21 bp, Homo sapiens
tacactatacyaaaactgcag

SEQ ID NO: 7047 - DNA, 21 bp, Homo sapiens
aacacaaaacyttgggcggag

SEQ ID NO: 7048 - DNA, 21 bp, Homo sapiens
tccagctctaygcctaaatca

SEQ ID NO: 7049 - DNA, 21 bp, Homo sapiens
caaaaccaagraggggatagt

SEQ ID NO: 7050 - DNA, 21 bp, Homo sapiens
ggtttaagccrtcttgcgagg

SEQ ID NO: 7051 - DNA, 21 bp, Homo sapiens
ggaggtggacrggagttctga

SEQ ID NO: 7052 - DNA, 21 bp, Homo sapiens
cccttcctgtrtggcaccaaa

SEQ ID NO: 7053 - DNA, 21 bp, Homo sapiens
ggcatgccttkggagagagcc

SEQ ID NO: 7054 - DNA, 21 bp, Homo sapiens
tgatgagatgytgttgggctc

SEQ ID NO: 7055 - DNA, 21 bp, Homo sapiens
aaatcactgtragaaaccctt

SEQ ID NO: 7056 - DNA, 21 bp, Homo sapiens
ctttcacactrtttgctacaa

SEQ ID NO: 7057 - DNA, 21 bp, Homo sapiens
tcaccccagcwactctggact

SEQ ID NO: 7058 - DNA, 21 bp, Homo sapiens
gccagggcctyggataggtac

SEQ ID NO: 7059 - DNA, 21 bp, Homo sapiens
tgaagcccagkacatgcaggc

SEQ ID NO: 7060 - DNA, 21 bp, Homo sapiens
ggcccttggargcctggctcc

SEQ ID NO: 7061 - DNA, 21 bp, Homo sapiens
ctcagcctggygcacagacag

SEQ ID NO: 7062 - DNA, 21 bp, Homo sapiens
tacctaggacytccataaagc

SEQ ID NO: 7063 - DNA, 21 bp, Homo sapiens
cctccccaagwggccggctaa

SEQ ID NO: 7064 - DNA, 21 bp, Homo sapiens
tccacactgarcagggctgac

SEQ ID NO: 7065 - DNA, 21 bp, Homo sapiens
ctgatgaagcmaacagctctc

SEQ ID NO: 7066 - DNA, 21 bp, Homo sapiens
tggctgccacytgtagcctgc

SEQ ID NO: 7067 - DNA, 21 bp, Homo sapiens
acatttcttcmgccttcactt

SEQ ID NO: 7068 - DNA, 21 bp, Homo sapiens
atgagcctccrtgacatattg

SEQ ID NO: 7069 - DNA, 21 bp, Homo sapiens
tagcacgtagyctcgtcctca

SEQ ID NO: 7070 - DNA, 21 bp, Homo sapiens
acttgggttgyttctgccttt

SEQ ID NO: 7071 - DNA, 21 bp, Homo sapiens
attttcaaatygagatatttt

SEQ ID NO: 7072 - DNA, 21 bp, Homo sapiens
taaatacttayttcatgtagt

SEQ ID NO: 7073 - DNA, 21 bp, Homo sapiens
tctaccttctrtgataccctt

SEQ ID NO: 7074 - DNA, 21 bp, Homo sapiens
gagattcactyccctttgatt

SEQ ID NO: 7075 - DNA, 21 bp, Homo sapiens
taaggcatgtyttctctcctg

SEQ ID NO: 7076 - DNA, 21 bp, Homo sapiens
taggaaaggaratgtcttaat

SEQ ID NO: 7077 - DNA, 21 bp, Homo sapiens
gctctgaggargaggatgcca

SEQ ID NO: 7078 - DNA, 21 bp, Homo sapiens
ttccttttttkttttcttttt

SEQ ID NO: 7079 - DNA, 21 bp, Homo sapiens
ttcagactccrcaggttgaag

SEQ ID NO: 7080 - DNA, 21 bp, Homo sapiens
agttaagacckcttcaatcta

SEQ ID NO: 7081 - DNA, 21 bp, Homo sapiens
ctctaaagtayttttatttct

SEQ ID NO: 7082 - DNA, 21 bp, Homo sapiens
taatgtttcayagttaacttg

SEQ ID NO: 7083 - DNA, 21 bp, Homo sapiens
gctttctctasaaaacttaat

SEQ ID NO: 7084 - DNA, 21 bp, Homo sapiens
actaattcttwaaggaaatgg

SEQ ID NO: 7085 - DNA, 21 bp, Homo sapiens
taggttcatawcctagctaga

SEQ ID NO: 7086 - DNA, 21 bp, Homo sapiens
ggatgaaataktctacaaatg

SEQ ID NO: 7087 - DNA, 21 bp, Homo sapiens
ttgttcctggrtcgtcagata

SEQ ID NO: 7088 - DNA, 21 bp, Homo sapiens
agcgtttcaakcattacttct

SEQ ID NO: 7089 - DNA, 21 bp, Homo sapiens
acggggcctcmcatatgtaca

SEQ ID NO: 7090 - DNA, 21 bp, Homo sapiens
gtgtggatccmctggtaggca

SEQ ID NO: 7091 - DNA, 21 bp, Homo sapiens
tctggagtgcraatatctagc

SEQ ID NO: 7092 - DNA, 21 bp, Homo sapiens
accagatactstttgttgctg

SEQ ID NO: 7093 - DNA, 21 bp, Homo sapiens
cctgtcttcartgttgtatgt

SEQ ID NO: 7094 - DNA, 21 bp, Homo sapiens
aacataaatargagaaaataa

SEQ ID NO: 7095 - DNA, 21 bp, Homo sapiens
attacagtttmtttctgaagc

SEQ ID NO: 7096 - DNA, 21 bp, Homo sapiens
ttaagtactcrtcaaatgcca

SEQ ID NO: 7097 - DNA, 21 bp, Homo sapiens
actttttatcmtaagtatttt

SEQ ID NO: 7098 - DNA, 21 bp, Homo sapiens
aacaccagcarctgtcagacc

SEQ ID NO: 7099 - DNA, 21 bp, Homo sapiens
gattgtagtayttttcctttc

SEQ ID NO: 7100 - DNA, 21 bp, Homo sapiens
aggcagtggamggtcatggaa

SEQ ID NO: 7101 - DNA, 21 bp, Homo sapiens
tacttttacayggagtaaata

SEQ ID NO: 7102 - DNA, 21 bp, Homo sapiens
acgagacttaycgagatgctg

SEQ ID NO: 7103 - DNA, 21 bp, Homo sapiens
gttacgtaggkatacatgtac

SEQ ID NO: 7104 - DNA, 21 bp, Homo sapiens
aattgcaagamattaacacag

SEQ ID NO: 7105 - DNA, 21 bp, Homo sapiens
gagaagcttgrgactgtgtgt

SEQ ID NO: 7106 - DNA, 21 bp, Homo sapiens
tgattttgttwattgtaactc

SEQ ID NO: 7107 - DNA, 21 bp, Homo sapiens
ctaggagtttraaactcctaa

SEQ ID NO: 7108 - DNA, 21 bp, Homo sapiens
gcgtcagcgcyttctctgtag

SEQ ID NO: 7109 - DNA, 21 bp, Homo sapiens
atatatgactsagattagttt

SEQ ID NO: 7110 - DNA, 21 bp, Homo sapiens
atcgactgacrtagcagaaag

SEQ ID NO: 7111 - DNA, 21 bp, Homo sapiens
tggacatctaycgacgatcca

SEQ ID NO: 7112 - DNA, 21 bp, Homo sapiens
gtaattaccakacctttccca

SEQ ID NO: 7113 - DNA, 21 bp, Homo sapiens
taattatatgyacccagctca

SEQ ID NO: 7114 - DNA, 21 bp, Homo sapiens
tgatgttgagrtgctgtgaga

SEQ ID NO: 7115 - DNA, 21 bp, Homo sapiens
aggcccagcckctgagatccc

SEQ ID NO: 7116 - DNA, 21 bp, Homo sapiens
cataatattgyccttgggtcg

SEQ ID NO: 7117 - DNA, 21 bp, Homo sapiens
acaccaaatcwggaggaggac

SEQ ID NO: 7118 - DNA, 21 bp, Homo sapiens
cttagacacaygggccaagac

SEQ ID NO: 7119 - DNA, 21 bp, Homo sapiens
cccaatatcayggagctgatc

SEQ ID NO: 7120 - DNA, 21 bp, Homo sapiens
gatgaccacayggacctctga

SEQ ID NO: 7121 - DNA, 21 bp, Homo sapiens
cctctaggcarccttccttca

SEQ ID NO: 7122 - DNA, 21 bp, Homo sapiens
gcattcaaatkcccctaactc

SEQ ID NO: 7123 - DNA, 21 bp, Homo sapiens
aagtcagccgytgtcctttat

SEQ ID NO: 7124 - DNA, 21 bp, Homo sapiens
atgacttcccygttgtaaccc

SEQ ID NO: 7125 - DNA, 21 bp, Homo sapiens
cagctccaccytgcacttgga

SEQ ID NO: 7126 - DNA, 21 bp, Homo sapiens
gtacagtttgrccacctggcc

SEQ ID NO: 7127 - DNA, 21 bp, Homo sapiens
gattttagtamaagtggactc

SEQ ID NO: 7128 - DNA, 21 bp, Homo sapiens
aatcgaaatartagtaggagc

SEQ ID NO: 7129 - DNA, 21 bp, Homo sapiens
atcctggccaygggtggatct

SEQ ID NO: 7130 - DNA, 21 bp, Homo sapiens
ggcagatctcsaggggcttag

SEQ ID NO: 7131 - DNA, 21 bp, Homo sapiens
tctctaccacsaggactggct

SEQ ID NO: 7132 - DNA, 21 bp, Homo sapiens
cagagtctgcsggctgtccca

SEQ ID NO: 7133 - DNA, 21 bp, Homo sapiens
tctaacccctkttcctcgtct

SEQ ID NO: 7134 - DNA, 21 bp, Homo sapiens
tgggggtgttsttgcacctgg

SEQ ID NO: 7135 - DNA, 21 bp, Homo sapiens
gggcagaccayggccatgacc

SEQ ID NO: 7136 - DNA, 21 bp, Homo sapiens
tggaaatcccrcatgggtgcc

SEQ ID NO: 7137 - DNA, 21 bp, Homo sapiens
tgggacagccycttcagcccc

SEQ ID NO: 7138 - DNA, 21 bp, Homo sapiens
ccatccagaaraaccacctgc

SEQ ID NO: 7139 - DNA, 21 bp, Homo sapiens
gcggggagccytctgagagcc

SEQ ID NO: 7140 - DNA, 21 bp, Homo sapiens
cttctgacccyggggtctggg

SEQ ID NO: 7141 - DNA, 21 bp, Homo sapiens
tcctcttggckgaagctcccc

SEQ ID NO: 7142 - DNA, 21 bp, Homo sapiens
agcctggcacrtctctgagag

SEQ ID NO: 7143 - DNA, 21 bp, Homo sapiens
gcctgggcctyagcaataagc

SEQ ID NO: 7144 - DNA, 21 bp, Homo sapiens
cacagagaacyggccctggag

SEQ ID NO: 7145 - DNA, 21 bp, Homo sapiens
cgggggcccartgagagtggc

SEQ ID NO: 7146 - DNA, 21 bp, Homo sapiens
atagctgcagsctggagccca

SEQ ID NO: 7147 - DNA, 21 bp, Homo sapiens
tcactctcttmtggcttgtta

SEQ ID NO: 7148 - DNA, 21 bp, Homo sapiens
caactcgcagmagctcagagg

SEQ ID NO: 7149 - DNA, 21 bp, Homo sapiens
atgtggtaggrccctgggtgc

SEQ ID NO: 7150 - DNA, 21 bp, Homo sapiens
tgcacttaaayagggaacaga

SEQ ID NO: 7151 - DNA, 21 bp, Homo sapiens
gccacacacaygggtgggagt

SEQ ID NO: 7152 - DNA, 21 bp, Homo sapiens
acacaccccartgaagatact

SEQ ID NO: 7153 - DNA, 21 bp, Homo sapiens
atggctactcygaggaggaat

SEQ ID NO: 7154 - DNA, 21 bp, Homo sapiens
tgtggtatctrtcatgtactt

SEQ ID NO: 7155 - DNA, 21 bp, Homo sapiens
gcttaagccartcccctctga

SEQ ID NO: 7156 - DNA, 21 bp, Homo sapiens
tagggcctccrgagggttgct

SEQ ID NO: 7157 - DNA, 21 bp, Homo sapiens
gggcctggagrgctgcagatc

SEQ ID NO: 7158 - DNA, 21 bp, Homo sapiens
agccccacagyccctggtgat

SEQ ID NO: 7159 - DNA, 21 bp, Homo sapiens
ccctttcacayggggaccttg

SEQ ID NO: 7160 - DNA, 21 bp, Homo sapiens
aacctcactcrctcccagagc

SEQ ID NO: 7161 - DNA, 21 bp, Homo sapiens
gtcctgcccaytggggggcgc

SEQ ID NO: 7162 - DNA, 21 bp, Homo sapiens
tagcaggtcaygcagtggagg

SEQ ID NO: 7163 - DNA, 21 bp, Homo sapiens
tcatattcaayggtggatgtc

SEQ ID NO: 7164 - DNA, 21 bp, Homo sapiens
ggagcaggggrccattggccc

SEQ ID NO: 7165 - DNA, 21 bp, Homo sapiens
gcaggctgtgraacagctcct

SEQ ID NO: 7166 - DNA, 21 bp, Homo sapiens
gcctgctctayaatcttgaca

SEQ ID NO: 7167 - DNA, 21 bp, Homo sapiens
ggggccttccwgggtggccgg

SEQ ID NO: 7168 - DNA, 21 bp, Homo sapiens
tgcaagggctrtacccccgga

SEQ ID NO: 7169 - DNA, 21 bp, Homo sapiens
tctttgtccaygtggctgcat

SEQ ID NO: 7170 - DNA, 21 bp, Homo sapiens
agaataaaatyatgtttcaaa

SEQ ID NO: 7171 - DNA, 21 bp, Homo sapiens
agaagtggtgrctgctgatcc

SEQ ID NO: 7172 - DNA, 21 bp, Homo sapiens
gatgcatcatsgatgcatccc

SEQ ID NO: 7173 - DNA, 21 bp, Homo sapiens
atggcccatgmcaccgccagc

SEQ ID NO: 7174 - DNA, 21 bp, Homo sapiens
ttcattcctgratggatttca

SEQ ID NO: 7175 - DNA, 21 bp, Homo sapiens
ctctgtgaccrctgcccagcc

SEQ ID NO: 7176 - DNA, 21 bp, Homo sapiens
ggagcaagctmcttcgctgtt

SEQ ID NO: 7177 - DNA, 21 bp, Homo sapiens
ctgaccaatamtttgtcccag

SEQ ID NO: 7178 - DNA, 21 bp, Homo sapiens
tgctagtccaractgctcggt

SEQ ID NO: 7179 - DNA, 21 bp, Homo sapiens
tctgtcacaaytttgtgctcc

SEQ ID NO: 7180 - DNA, 21 bp, Homo sapiens
cagtgttcacrctgggccacc

SEQ ID NO: 7181 - DNA, 21 bp, Homo sapiens
ggtgtagtacmaatggtgacc

SEQ ID NO: 7182 - DNA, 21 bp, Homo sapiens
gattcacgctrtaactgggac

SEQ ID NO: 7183 - DNA, 21 bp, Homo sapiens
ggctttgcgcmtcctacctgg

SEQ ID NO: 7184 - DNA, 21 bp, Homo sapiens
gagggttcggsaagcaacaca

SEQ ID NO: 7185 - DNA, 21 bp, Homo sapiens
aaactcgttcrtgatctgaaa

SEQ ID NO: 7186 - DNA, 21 bp, Homo sapiens
ccaccgccccstctcctcact

SEQ ID NO: 7187 - DNA, 21 bp, Homo sapiens
ctcctcccccmaccccccaag

SEQ ID NO: 7188 - DNA, 21 bp, Homo sapiens
agctacctcaragtaggcctt

SEQ ID NO: 7189 - DNA, 21 bp, Homo sapiens
tctcagggtgrgtagtgagca

SEQ ID NO: 7190 - DNA, 21 bp, Homo sapiens
ggcctcccacygcaccgagag

SEQ ID NO: 7191 - DNA, 21 bp, Homo sapiens
tcctttctgcytgggacactc

SEQ ID NO: 7192 - DNA, 21 bp, Homo sapiens
ggtatatgagyaggtgatccc

SEQ ID NO: 7193 - DNA, 21 bp, Homo sapiens
cgaggggtgamtggagagggc

SEQ ID NO: 7194 - DNA, 21 bp, Homo sapiens
cccaactttcycaactaatgt

SEQ ID NO: 7195 - DNA, 21 bp, Homo sapiens
tgggtcctctkaatcagccag

SEQ ID NO: 7196 - DNA, 21 bp, Homo sapiens
acccagagccmccctcctgga

SEQ ID NO: 7197 - DNA, 21 bp, Homo sapiens
gtggccagaasagctgggcgc

SEQ ID NO: 7198 - DNA, 21 bp, Homo sapiens
tgttggacacsggcttctggc

SEQ ID NO: 7199 - DNA, 21 bp, Homo sapiens
gcctgcccacsccgaccccaa

SEQ ID NO: 7200 - DNA, 21 bp, Homo sapiens
gcccatcaaayaggacttttt

SEQ ID NO: 7201 - DNA, 21 bp, Homo sapiens
gcatggtgctscctcctgtcc

SEQ ID NO: 7202 - DNA, 21 bp, Homo sapiens
gccatctatgygggcaaaagc

SEQ ID NO: 7203 - DNA, 21 bp, Homo sapiens
aacccataccrgggggttctt

SEQ ID NO: 7204 - DNA, 21 bp, Homo sapiens
tctctccactygtcccttggt

SEQ ID NO: 7205 - DNA, 21 bp, Homo sapiens
cttcgattttsatattcatga

SEQ ID NO: 7206 - DNA, 21 bp, Homo sapiens
gagtccaagtwgcctggagct

SEQ ID NO: 7207 - DNA, 21 bp, Homo sapiens
tgaagacgatsaggttgaact

SEQ ID NO: 7208 - DNA, 21 bp, Homo sapiens
gccatcgatgwtcctgggggc

SEQ ID NO: 7209 - DNA, 21 bp, Homo sapiens
tcaggtcctcstccttcacag

SEQ ID NO: 7210 - DNA, 21 bp, Homo sapiens
tgttcactggrtggcaagcgg

SEQ ID NO: 7211 - DNA, 21 bp, Homo sapiens
gtagtgcaacygaatggggac

SEQ ID NO: 7212 - DNA, 21 bp, Homo sapiens
tgtacacaagkgaatgacttt

SEQ ID NO: 7213 - DNA, 21 bp, Homo sapiens
tgcactcaaayagggaacact

SEQ ID NO: 7214 - DNA, 21 bp, Homo sapiens
agactcactgsaaaggaggag

SEQ ID NO: 7215 - DNA, 21 bp, Homo sapiens
caaagcggaaygcagctgctt

SEQ ID NO: 7216 - DNA, 21 bp, Homo sapiens
acctgattggycttggatagc

SEQ ID NO: 7217 - DNA, 21 bp, Homo sapiens
ctctaaatccmattacaagta

SEQ ID NO: 7218 - DNA, 21 bp, Homo sapiens
agtcccacccsatctcacctg

SEQ ID NO: 7219 - DNA, 21 bp, Homo sapiens
aaagggtgacrgaaaagctat

SEQ ID NO: 7220 - DNA, 21 bp, Homo sapiens
attacttttgyagtaacaaca

SEQ ID NO: 7221 - DNA, 21 bp, Homo sapiens
cctacttggcyggcagtggga

SEQ ID NO: 7222 - DNA, 21 bp, Homo sapiens
tcttggtattkttcatcaatt

SEQ ID NO: 7223 - DNA, 21 bp, Homo sapiens
aaacaagatgyggcaggaggg

SEQ ID NO: 7224 - DNA, 21 bp, Homo sapiens
cagctgtgagyccctcaagga

SEQ ID NO: 7225 - DNA, 21 bp, Homo sapiens
ctggggtgggkcccaatagtt

SEQ ID NO: 7226 - DNA, 21 bp, Homo sapiens
ctcactcctcrtgactagaat

SEQ ID NO: 7227 - DNA, 21 bp, Homo sapiens
ctgggaacttsttggaaatgc

SEQ ID NO: 7228 - DNA, 21 bp, Homo sapiens
atactgctatraagcacagag

SEQ ID NO: 7229 - DNA, 21 bp, Homo sapiens
ctctacttggkataaatgtct

SEQ ID NO: 7230 - DNA, 21 bp, Homo sapiens
aggaaatataycctctgaaat

SEQ ID NO: 7231 - DNA, 21 bp, Homo sapiens
gaacatctgcrtttgagtgtt

SEQ ID NO: 7232 - DNA, 21 bp, Homo sapiens
tacccaccagrcaggggacta

SEQ ID NO: 7233 - DNA, 21 bp, Homo sapiens
ctttgagaatmatcttcttcc

SEQ ID NO: 7234 - DNA, 21 bp, Homo sapiens
tctctaataayaacgtttatt

SEQ ID NO: 7235 - DNA, 21 bp, Homo sapiens
tgatctatccygtttacacat

SEQ ID NO: 7236 - DNA, 21 bp, Homo sapiens
cctagtggackccttaggaag

SEQ ID NO: 7237 - DNA, 21 bp, Homo sapiens
gtcatacttakgttctgctca

SEQ ID NO: 7238 - DNA, 21 bp, Homo sapiens
gttgacacagrtaagtctcaa

SEQ ID NO: 7239 - DNA, 21 bp, Homo sapiens
ggttgatatcyaaaatgttgg

SEQ ID NO: 7240 - DNA, 21 bp, Homo sapiens
actgcaagagygacaatacag

SEQ ID NO: 7241 - DNA, 21 bp, Homo sapiens
ggctctaattyagtggataat

SEQ ID NO: 7242 - DNA, 21 bp, Homo sapiens
ttcttttaacwgtattgggta

SEQ ID NO: 7243 - DNA, 21 bp, Homo sapiens
aagtgcagttrggtttataat

SEQ ID NO: 7244 - DNA, 21 bp, Homo sapiens
aaaatcacgamaggcaaccat

SEQ ID NO: 7245 - DNA, 21 bp, Homo sapiens
tcttataaagyagtaattcag

SEQ ID NO: 7246 - DNA, 21 bp, Homo sapiens
atacagtttcyaacagaaggg

SEQ ID NO: 7247 - DNA, 21 bp, Homo sapiens
gagtgcccatycctctccctg

SEQ ID NO: 7248 - DNA, 21 bp, Homo sapiens
gatcatattcrgctactgaaa

SEQ ID NO: 7249 - DNA, 21 bp, Homo sapiens
cctgtgtaacrtagggcctcc

SEQ ID NO: 7250 - DNA, 21 bp, Homo sapiens
catacacacamattctttcca

SEQ ID NO: 7251 - DNA, 21 bp, Homo sapiens
agtgatgggcyctaagttgag

SEQ ID NO: 7252 - DNA, 21 bp, Homo sapiens
agttagtaaargaaaccttcc

SEQ ID NO: 7253 - DNA, 21 bp, Homo sapiens
tcaaaagacarcaagtatcca

SEQ ID NO: 7254 - DNA, 21 bp, Homo sapiens
cagctgctcaytgcagttaca

SEQ ID NO: 7255 - DNA, 21 bp, Homo sapiens
ggtattctgargttcttttaa

SEQ ID NO: 7256 - DNA, 21 bp, Homo sapiens
gacctcaagtyccacaggaaa

SEQ ID NO: 7257 - DNA, 21 bp, Homo sapiens
tttaaattgawtatcagcaag

SEQ ID NO: 7258 - DNA, 21 bp, Homo sapiens
catacacccgsccacctgctc

SEQ ID NO: 7259 - DNA, 21 bp, Homo sapiens
gggccaggccyggaccctggg

SEQ ID NO: 7260 - DNA, 21 bp, Homo sapiens
ataatcttctractcgtgtgg

SEQ ID NO: 7261 - DNA, 21 bp, Homo sapiens
taataaatctratccaaataa

SEQ ID NO: 7262 - DNA, 21 bp, Homo sapiens
tccacatccasgacctcgaat

SEQ ID NO: 7263 - DNA, 21 bp, Homo sapiens
ccattgaagasagaggtttta

SEQ ID NO: 7264 - DNA, 21 bp, Homo sapiens
cctttagaccrcactcagggt

SEQ ID NO: 7265 - DNA, 21 bp, Homo sapiens
tgaggacatcmtaagaaccag

SEQ ID NO: 7266 - DNA, 21 bp, Homo sapiens
acagagttccrggcacactta

SEQ ID NO: 7267 - DNA, 21 bp, Homo sapiens
tatgatttctrctccccaaat

SEQ ID NO: 7268 - DNA, 21 bp, Homo sapiens
ttccctttttycatcagcatg

SEQ ID NO: 7269 - DNA, 21 bp, Homo sapiens
aggaggcaaamtagagggccg

SEQ ID NO: 7270 - DNA, 21 bp, Homo sapiens
tagttttaaaratatatcgaa

SEQ ID NO: 7271 - DNA, 21 bp, Homo sapiens
tggtttaaatsggcctgtggt

SEQ ID NO: 7272 - DNA, 21 bp, Homo sapiens
gtatttattcwctaagcctta

SEQ ID NO: 7273 - DNA, 21 bp, Homo sapiens
tcccgtgcagyagtcaaagaa

SEQ ID NO: 7274 - DNA, 21 bp, Homo sapiens
agaaatagcayacgcttagca

SEQ ID NO: 7275 - DNA, 21 bp, Homo sapiens
ctcactggccygttaagaaga

SEQ ID NO: 7276 - DNA, 21 bp, Homo sapiens
ctccggagtgyagaggttctt

SEQ ID NO: 7277 - DNA, 21 bp, Homo sapiens
tactcactatrgctcaggcac

SEQ ID NO: 7278 - DNA, 21 bp, Homo sapiens
cttcactgatyagccttcgct

SEQ ID NO: 7279 - DNA, 21 bp, Homo sapiens
cttggtcttaygtggaaagac

SEQ ID NO: 7280 - DNA, 21 bp, Homo sapiens
tccaacatttyaatttatctt

SEQ ID NO: 7281 - DNA, 21 bp, Homo sapiens
gaggaggtcgsgggggggggt

SEQ ID NO: 7282 - DNA, 21 bp, Homo sapiens
gcctgtttggyggtgcctccc

SEQ ID NO: 7283 - DNA, 21 bp, Homo sapiens
agggattggcrtgggagatgg

SEQ ID NO: 7284 - DNA, 21 bp, Homo sapiens
tacttgttcartaggttccat

SEQ ID NO: 7285 - DNA, 21 bp, Homo sapiens
gtgtgtacatyacagcttgtg

SEQ ID NO: 7286 - DNA, 21 bp, Homo sapiens
tgggtctgacrctatggttac

SEQ ID NO: 7287 - DNA, 21 bp, Homo sapiens
gccactgagtygctatagggc

SEQ ID NO: 7288 - DNA, 21 bp, Homo sapiens
ctaggggttgragaagaggct

SEQ ID NO: 7289 - DNA, 21 bp, Homo sapiens
ggagagtactytgccatcaag

SEQ ID NO: 7290 - DNA, 21 bp, Homo sapiens
caatgtgctgytggaccggga

SEQ ID NO: 7291 - DNA, 21 bp, Homo sapiens
catagcagctyttgcctacct

SEQ ID NO: 7292 - DNA, 21 bp, Homo sapiens
atctccggacsgccctaaatt

SEQ ID NO: 7293 - DNA, 21 bp, Homo sapiens
agctgacgcartcaaggaaca

SEQ ID NO: 7294 - DNA, 21 bp, Homo sapiens
gtttaaccacygccactgggt

SEQ ID NO: 7295 - DNA, 21 bp, Homo sapiens
tgaagataacrgagtaacatc

SEQ ID NO: 7296 - DNA, 21 bp, Homo sapiens
ttcaaaatacwtgaagctaaa

SEQ ID NO: 7297 - DNA, 21 bp, Homo sapiens
aaacataccaygtacaacttg

SEQ ID NO: 7298 - DNA, 21 bp, Homo sapiens
acacttgggawtgaggacctc

SEQ ID NO: 7299 - DNA, 21 bp, Homo sapiens
ccgccctaggmcttggtgatg

SEQ ID NO: 7300 - DNA, 21 bp, Homo sapiens
atcttcagcasctcagccggc

SEQ ID NO: 7301 - DNA, 21 bp, Homo sapiens
cttgggtaaargacagttgat

SEQ ID NO: 7302 - DNA, 21 bp, Homo sapiens
cactcagaacrtcctcatata

SEQ ID NO: 7303 - DNA, 21 bp, Homo sapiens
gcagaacagayggcatttaca

SEQ ID NO: 7304 - DNA, 21 bp, Homo sapiens
ccaaataaaaygctcttaaac

SEQ ID NO: 7305 - DNA, 21 bp, Homo sapiens
tgatgagtgaytgacatggtt

SEQ ID NO: 7306 - DNA, 21 bp, Homo sapiens
gtgtggaaaargaggacagcc

SEQ ID NO: 7307 - DNA, 21 bp, Homo sapiens
gtgccctgaastacccgagct

SEQ ID NO: 7308 - DNA, 21 bp, Homo sapiens
tgggatacaaycccagccact

SEQ ID NO: 7309 - DNA, 21 bp, Homo sapiens
ggggagcgtastctgaggtgg

SEQ ID NO: 7310 - DNA, 21 bp, Homo sapiens
tatcactctgrtctctgacaa

SEQ ID NO: 7311 - DNA, 21 bp, Homo sapiens
agagccacatkctggaatctg

SEQ ID NO: 7312 - DNA, 21 bp, Homo sapiens
aggatcatgtmaaaccatttt

SEQ ID NO: 7313 - DNA, 21 bp, Homo sapiens
ctccactgccractcagagac

SEQ ID NO: 7314 - DNA, 21 bp, Homo sapiens
gcatgaaatgmttcttctgac

SEQ ID NO: 7315 - DNA, 21 bp, Homo sapiens
aaagacagacrgatataagaa

SEQ ID NO: 7316 - DNA, 21 bp, Homo sapiens
tggaaagcgartttgccaagg

SEQ ID NO: 7317 - DNA, 21 bp, Homo sapiens
caaagtatagsttacctaatc

SEQ ID NO: 7318 - DNA, 21 bp, Homo sapiens
tttagtacttscgtatcatgt

SEQ ID NO: 7319 - DNA, 21 bp, Homo sapiens
gcccagatgtrgaacactgga

SEQ ID NO: 7320 - DNA, 21 bp, Homo sapiens
catgctgtccwatgaaggaaa

SEQ ID NO: 7321 - DNA, 21 bp, Homo sapiens
caatgcttcarttacagcagg

SEQ ID NO: 7322 - DNA, 21 bp, Homo sapiens
tagaggctggkttggactgaa

SEQ ID NO: 7323 - DNA, 21 bp, Homo sapiens
gagaggaaatragctcttggt

SEQ ID NO: 7324 - DNA, 21 bp, Homo sapiens
ccctgacccawctcttgatca

SEQ ID NO: 7325 - DNA, 21 bp, Homo sapiens
tacttgagctmtgtctttgag

SEQ ID NO: 7326 - DNA, 21 bp, Homo sapiens
cgtggataatrgaagactttt

SEQ ID NO: 7327 - DNA, 21 bp, Homo sapiens
ggggcaaacamaaagagcatt

SEQ ID NO: 7328 - DNA, 21 bp, Homo sapiens
gatgaaaggcmgactttgttt

SEQ ID NO: 7329 - DNA, 21 bp, Homo sapiens
tcagaaagtgmaggataattg

SEQ ID NO: 7330 - DNA, 21 bp, Homo sapiens
tcttcaattcsacctcatttt

SEQ ID NO: 7331 - DNA, 21 bp, Homo sapiens
ctcggattctrggaggtataa

SEQ ID NO: 7332 - DNA, 21 bp, Homo sapiens
aagaccattcrtcccctggac

SEQ ID NO: 7333 - DNA, 21 bp, Homo sapiens
gcccttgaggrccaaaccctt

SEQ ID NO: 7334 - DNA, 21 bp, Homo sapiens
gcaagtatctktatggtagta

SEQ ID NO: 7335 - DNA, 21 bp, Homo sapiens
ggaaacaacaygttaacattt

SEQ ID NO: 7336 - DNA, 21 bp, Homo sapiens
gagtaagaaargaagagttgc

SEQ ID NO: 7337 - DNA, 21 bp, Homo sapiens
gtccctgaggytttgagattg

SEQ ID NO: 7338 - DNA, 21 bp, Homo sapiens
cttaggtgtayaaaattaatg

SEQ ID NO: 7339 - DNA, 21 bp, Homo sapiens
aatcagtccarcctcacaaag

SEQ ID NO: 7340 - DNA, 21 bp, Homo sapiens
tccctccccaktctgggttaa

SEQ ID NO: 7341 - DNA, 21 bp, Homo sapiens
tacaaggaaamaatttctatc

SEQ ID NO: 7342 - DNA, 21 bp, Homo sapiens
aatgcatcccygattagtttt

SEQ ID NO: 7343 - DNA, 21 bp, Homo sapiens
gctagaggtcrataggaatta

SEQ ID NO: 7344 - DNA, 21 bp, Homo sapiens
gtgagtgatgsccctctggaa

SEQ ID NO: 7345 - DNA, 21 bp, Homo sapiens
acttagatgcygtaggacaga

SEQ ID NO: 7346 - DNA, 21 bp, Homo sapiens
ttgtggtaagkgtgtggccat

SEQ ID NO: 7347 - DNA, 21 bp, Homo sapiens
attttttttcraaggaccagt

SEQ ID NO: 7348 - DNA, 21 bp, Homo sapiens
ttccctctcartaatctatct

SEQ ID NO: 7349 - DNA, 21 bp, Homo sapiens
gtacattcctrctttggaaaa

SEQ ID NO: 7350 - DNA, 21 bp, Homo sapiens
agaattaaaartcctcagctt

SEQ ID NO: 7351 - DNA, 21 bp, Homo sapiens
catcagtgttsactggggata

SEQ ID NO: 7352 - DNA, 21 bp, Homo sapiens
tgagtgatctycttggtgtta

SEQ ID NO: 7353 - DNA, 21 bp, Homo sapiens
ccttttgattrtttccctcta

SEQ ID NO: 7354 - DNA, 21 bp, Homo sapiens
caggaaatagyttataaaaat

SEQ ID NO: 7355 - DNA, 21 bp, Homo sapiens
actctcctcayctgtcttaca

SEQ ID NO: 7356 - DNA, 21 bp, Homo sapiens
ccatcagttcsctccctctag

SEQ ID NO: 7357 - DNA, 21 bp, Homo sapiens
attaaattaakgtgggtattg

SEQ ID NO: 7358 - DNA, 21 bp, Homo sapiens
ctaaatcagtraaagtaatac

SEQ ID NO: 7359 - DNA, 21 bp, Homo sapiens
aatgtaaagtwcttaatttcc

SEQ ID NO: 7360 - DNA, 21 bp, Homo sapiens
ctatacctatwtttagcagga

SEQ ID NO: 7361 - DNA, 21 bp, Homo sapiens
cttgcttcacyaactaggagt

SEQ ID NO: 7362 - DNA, 21 bp, Homo sapiens
gggatgttctrctgggtctgg

SEQ ID NO: 7363 - DNA, 21 bp, Homo sapiens
ttcaggaagtwtatggttcat

SEQ ID NO: 7364 - DNA, 21 bp, Homo sapiens
tgtacgaaaakgtgagtaaga

SEQ ID NO: 7365 - DNA, 21 bp, Homo sapiens
atgcacataaytgttttaaag

SEQ ID NO: 7366 - DNA, 21 bp, Homo sapiens
catgtttaagyctcttgtaaa

SEQ ID NO: 7367 - DNA, 21 bp, Homo sapiens
caacataaacygctctagtat

SEQ ID NO: 7368 - DNA, 21 bp, Homo sapiens
gctaatcaggrccgctagcag

SEQ ID NO: 7369 - DNA, 21 bp, Homo sapiens
tattcagcacraagtcttcca

SEQ ID NO: 7370 - DNA, 21 bp, Homo sapiens
atagaaatttkgtacttatca

SEQ ID NO: 7371 - DNA, 21 bp, Homo sapiens
atgtcactatrgtcgattagg

SEQ ID NO: 7372 - DNA, 21 bp, Homo sapiens
atatgacagargtgagggtaa

SEQ ID NO: 7373 - DNA, 21 bp, Homo sapiens
agtgattctcraatttggcat

SEQ ID NO: 7374 - DNA, 21 bp, Homo sapiens
tgcgttcctaygtttgaatta

SEQ ID NO: 7375 - DNA, 21 bp, Homo sapiens
aacattgtctrttctctactg

SEQ ID NO: 7376 - DNA, 21 bp, Homo sapiens
cttctgatacracataatgga

SEQ ID NO: 7377 - DNA, 21 bp, Homo sapiens
cccctgatctragaaacatcc

SEQ ID NO: 7378 - DNA, 21 bp, Homo sapiens
caagtggacarctttagttct

SEQ ID NO: 7379 - DNA, 21 bp, Homo sapiens
caagttctatrtttctacaag

SEQ ID NO: 7380 - DNA, 21 bp, Homo sapiens
tgcaaaacccrtctggaacat

SEQ ID NO: 7381 - DNA, 21 bp, Homo sapiens
cagaatccackaacattcatg

SEQ ID NO: 7382 - DNA, 21 bp, Homo sapiens
aaagtcatgcyagtctgtgac

SEQ ID NO: 7383 - DNA, 21 bp, Homo sapiens
gtccagttgtwtcctccttgg

SEQ ID NO: 7384 - DNA, 21 bp, Homo sapiens
tcaaataaacrtacaatctat

SEQ ID NO: 7385 - DNA, 21 bp, Homo sapiens
cctaacctgaygtatgctgag

SEQ ID NO: 7386 - DNA, 21 bp, Homo sapiens
tctatatcttytgcctctaat

SEQ ID NO: 7387 - DNA, 21 bp, Homo sapiens
atctttgccamtgaatgttgc

SEQ ID NO: 7388 - DNA, 21 bp, Homo sapiens
tcacctttccytgttctgaat

SEQ ID NO: 7389 - DNA, 21 bp, Homo sapiens
cctcctgctaygcacattgga

SEQ ID NO: 7390 - DNA, 21 bp, Homo sapiens
gaaggcttgargtcatgtggt

SEQ ID NO: 7391 - DNA, 21 bp, Homo sapiens
tcaaatttaartttttctcag

SEQ ID NO: 7392 - DNA, 21 bp, Homo sapiens
acttctagatraggtggaaaa

SEQ ID NO: 7393 - DNA, 21 bp, Homo sapiens
gttcgcagtarccataggcaa

SEQ ID NO: 7394 - DNA, 21 bp, Homo sapiens
tggaatgtaamgtaggtcaag

SEQ ID NO: 7395 - DNA, 21 bp, Homo sapiens
aacatgaccartaagcagcgt

SEQ ID NO: 7396 - DNA, 21 bp, Homo sapiens
ttagcgttatrtcttacatcc

SEQ ID NO: 7397 - DNA, 21 bp, Homo sapiens
aactttcttgsgattgataat

SEQ ID NO: 7398 - DNA, 21 bp, Homo sapiens
tttcctgagawcttttaatgt

SEQ ID NO: 7399 - DNA, 21 bp, Homo sapiens
tcaagtcaaasagaataatgt

SEQ ID NO: 7400 - DNA, 21 bp, Homo sapiens
tgggacccatsatgagaagga

SEQ ID NO: 7401 - DNA, 21 bp, Homo sapiens
tgtgatgccarcctccacagt

SEQ ID NO: 7402 - DNA, 21 bp, Homo sapiens
ctttttaaacrtatcttttaa

SEQ ID NO: 7403 - DNA, 21 bp, Homo sapiens
aaagaaacctygcccttatat

SEQ ID NO: 7404 - DNA, 21 bp, Homo sapiens
actgagatgawctgaaaatga

SEQ ID NO: 7405 - DNA, 21 bp, Homo sapiens
tacttatataycctccaccca

SEQ ID NO: 7406 - DNA, 21 bp, Homo sapiens
gctaggtctgkggtcataaat

SEQ ID NO: 7407 - DNA, 21 bp, Homo sapiens
ttctgagactyagtgggagat

SEQ ID NO: 7408 - DNA, 21 bp, Homo sapiens
agtcaaaacartatgggtgta

SEQ ID NO: 7409 - DNA, 21 bp, Homo sapiens
attatttgttstaattgagtg

SEQ ID NO: 7410 - DNA, 21 bp, Homo sapiens
ttaggattcarcctacaacca

SEQ ID NO: 7411 - DNA, 21 bp, Homo sapiens
tggtggccaamaagtaagtaa

SEQ ID NO: 7412 - DNA, 21 bp, Homo sapiens
tcaacatgatrtattgtaaga

SEQ ID NO: 7413 - DNA, 21 bp, Homo sapiens
ggcgtccacasggctcctccc

SEQ ID NO: 7414 - DNA, 21 bp, Homo sapiens
gtgaattctcsacgtctttat

SEQ ID NO: 7415 - DNA, 21 bp, Homo sapiens
atccatcccayatccagttgc

SEQ ID NO: 7416 - DNA, 21 bp, Homo sapiens
attcatcttcrtaaccagaaa

SEQ ID NO: 7417 - DNA, 21 bp, Homo sapiens
cccatattttygatgccaggc

SEQ ID NO: 7418 - DNA, 21 bp, Homo sapiens
catcctattcytactttcaca

SEQ ID NO: 7419 - DNA, 21 bp, Homo sapiens
tgacatctttrcattcctgcc

SEQ ID NO: 7420 - DNA, 21 bp, Homo sapiens
gacttctcagmccacatttgc

SEQ ID NO: 7421 - DNA, 21 bp, Homo sapiens
tttgccatcgytgtgacttct

SEQ ID NO: 7422 - DNA, 21 bp, Homo sapiens
caatcaataaygtaagcagac

SEQ ID NO: 7423 - DNA, 21 bp, Homo sapiens
gtttgggggaygtatgagaga

SEQ ID NO: 7424 - DNA, 21 bp, Homo sapiens
aaatagagcarcagctggatt

SEQ ID NO: 7425 - DNA, 21 bp, Homo sapiens
ctaggggaatmctaccacttt

SEQ ID NO: 7426 - DNA, 21 bp, Homo sapiens
gatagtaattrtaataataat

SEQ ID NO: 7427 - DNA, 21 bp, Homo sapiens
atctgttttgstgacggttgg

SEQ ID NO: 7428 - DNA, 21 bp, Homo sapiens
ccttgtgatgyatccattaat

SEQ ID NO: 7429 - DNA, 21 bp, Homo sapiens
taaaaacgaaytttgcattct

SEQ ID NO: 7430 - DNA, 21 bp, Homo sapiens
ttttattgggmaggtatagag

SEQ ID NO: 7431 - DNA, 21 bp, Homo sapiens
tctgccaggcwtagcaaagaa

SEQ ID NO: 7432 - DNA, 21 bp, Homo sapiens
tctctaaagcrtttttatttc

SEQ ID NO: 7433 - DNA, 21 bp, Homo sapiens
agtctttacayatgcctctgt

SEQ ID NO: 7434 - DNA, 21 bp, Homo sapiens
agagaaattcrgcaacttagc

SEQ ID NO: 7435 - DNA, 21 bp, Homo sapiens
aatgactcacycaggttcata

SEQ ID NO: 7436 - DNA, 21 bp, Homo sapiens
tatatttgctkctttttcttt

SEQ ID NO: 7437 - DNA, 21 bp, Homo sapiens
aaatttcatartctctttcag

SEQ ID NO: 7438 - DNA, 21 bp, Homo sapiens
ggagaggctamgaagaaatta

SEQ ID NO: 7439 - DNA, 21 bp, Homo sapiens
tttgaatctgkacgacaccag

SEQ ID NO: 7440 - DNA, 21 bp, Homo sapiens
atatggatgtrtgcaaaaaga

SEQ ID NO: 7441 - DNA, 21 bp, Homo sapiens
atcttattaamcccagagatt

SEQ ID NO: 7442 - DNA, 21 bp, Homo sapiens
ttgaactggawatgtgcttac

SEQ ID NO: 7443 - DNA, 21 bp, Homo sapiens
gtgatcgttgytatgggacca

SEQ ID NO: 7444 - DNA, 21 bp, Homo sapiens
tgtgcatagtstacatggtcc

SEQ ID NO: 7445 - DNA, 21 bp, Homo sapiens
ttcaagaccartgttgagaaa

SEQ ID NO: 7446 - DNA, 21 bp, Homo sapiens
tggcctatagygttgttcaag

SEQ ID NO: 7447 - DNA, 21 bp, Homo sapiens
gcagaaaattrcatgtgcata

SEQ ID NO: 7448 - DNA, 21 bp, Homo sapiens
ataattttgayagttaaactt

SEQ ID NO: 7449 - DNA, 21 bp, Homo sapiens
aatatttgagsgctcgtggtt

SEQ ID NO: 7450 - DNA, 21 bp, Homo sapiens
ttgtaggggtyagtgactctg

SEQ ID NO: 7451 - DNA, 21 bp, Homo sapiens
ttgtatctacyaccagagtta

SEQ ID NO: 7452 - DNA, 21 bp, Homo sapiens
ggggcatgtartccagcataa

SEQ ID NO: 7453 - DNA, 21 bp, Homo sapiens
cagtcagtgayggttgaattt

SEQ ID NO: 7454 - DNA, 21 bp, Homo sapiens
atgaagctttrtcttctatct

SEQ ID NO: 7455 - DNA, 21 bp, Homo sapiens
tgaatggtctraaatatttgg

SEQ ID NO: 7456 - DNA, 21 bp, Homo sapiens
tggctccatcmaggtcacagc

SEQ ID NO: 7457 - DNA, 21 bp, Homo sapiens
aagacattttrcttaacaaaa

SEQ ID NO: 7458 - DNA, 21 bp, Homo sapiens
ggcttcccagscatgcctgct

SEQ ID NO: 7459 - DNA, 21 bp, Homo sapiens
tctcttaagtwtttaaacaaa

SEQ ID NO: 7460 - DNA, 21 bp, Homo sapiens
agacttttgcytgagacaaac

SEQ ID NO: 7461 - DNA, 21 bp, Homo sapiens
actggctggayttacatttct

SEQ ID NO: 7462 - DNA, 21 bp, Homo sapiens
cagtagaataygaataaagtc

SEQ ID NO: 7463 - DNA, 21 bp, Homo sapiens
tttactgaggrcttttcttag

SEQ ID NO: 7464 - DNA, 21 bp, Homo sapiens
caacttaagayatagctgctt

SEQ ID NO: 7465 - DNA, 21 bp, Homo sapiens
aatgcaaaatsaatgtttgat

SEQ ID NO: 7466 - DNA, 21 bp, Homo sapiens
agtgtctgaargatttttctt

SEQ ID NO: 7467 - DNA, 21 bp, Homo sapiens
attggctggcytcagagtaaa

SEQ ID NO: 7468 - DNA, 21 bp, Homo sapiens
ttattctttaygtattcaggc

SEQ ID NO: 7469 - DNA, 21 bp, Homo sapiens
tgcgaaatttmtgttggctac

SEQ ID NO: 7470 - DNA, 21 bp, Homo sapiens
gtaatcacccraaagtttctt

SEQ ID NO: 7471 - DNA, 21 bp, Homo sapiens
attgaaggagrcattggagaa

SEQ ID NO: 7472 - DNA, 21 bp, Homo sapiens
agattttaatrttatattatt

SEQ ID NO: 7473 - DNA, 21 bp, Homo sapiens
taacaaaacakactcctttca

SEQ ID NO: 7474 - DNA, 21 bp, Homo sapiens
ctcttacactkaatattttat

SEQ ID NO: 7475 - DNA, 21 bp, Homo sapiens
tagagtttgtwtacctatcaa

SEQ ID NO: 7476 - DNA, 21 bp, Homo sapiens
cagcctattayatataccttt

SEQ ID NO: 7477 - DNA, 21 bp, Homo sapiens
cctacatttgycctcttctca

SEQ ID NO: 7478 - DNA, 21 bp, Homo sapiens
tatgcttacarcaatatcaat

SEQ ID NO: 7479 - DNA, 21 bp, Homo sapiens
gacgacacttyagaaagagtg

SEQ ID NO: 7480 - DNA, 21 bp, Homo sapiens
aaaactcttaycttttaatta

SEQ ID NO: 7481 - DNA, 21 bp, Homo sapiens
tcctattgccwagagcataaa

SEQ ID NO: 7482 - DNA, 21 bp, Homo sapiens
agttcctgttygggaaaagga

SEQ ID NO: 7483 - DNA, 21 bp, Homo sapiens
gagatattggwatttctgaga

SEQ ID NO: 7484 - DNA, 21 bp, Homo sapiens
ttcactattckttgcaatgaa

SEQ ID NO: 7485 - DNA, 21 bp, Homo sapiens
ttttattcatyggcatttata

SEQ ID NO: 7486 - DNA, 21 bp, Homo sapiens
gttacaaaacratgtatgagc

SEQ ID NO: 7487 - DNA, 21 bp, Homo sapiens
taaagaaatcrtagcactggg

SEQ ID NO: 7488 - DNA, 21 bp, Homo sapiens
tatttctgtcytaatcggcaa

SEQ ID NO: 7489 - DNA, 21 bp, Homo sapiens
atttggaatgmttcattcatg

SEQ ID NO: 7490 - DNA, 21 bp, Homo sapiens
gctgcagtttktatgcacttc

SEQ ID NO: 7491 - DNA, 21 bp, Homo sapiens
gtcatcagtayacccagacaa

SEQ ID NO: 7492 - DNA, 21 bp, Homo sapiens
tcctcatccaygatcccaacc

SEQ ID NO: 7493 - DNA, 21 bp, Homo sapiens
tcagtctaagkgttcttcttc

SEQ ID NO: 7494 - DNA, 21 bp, Homo sapiens
taccggtgacrtttaaaacta

SEQ ID NO: 7495 - DNA, 21 bp, Homo sapiens
atctttgcccrttgattagaa

SEQ ID NO: 7496 - DNA, 21 bp, Homo sapiens
gtctgaacagraaaaacgtga

SEQ ID NO: 7497 - DNA, 21 bp, Homo sapiens
ttctaagtaaracaaacaata

SEQ ID NO: 7498 - DNA, 21 bp, Homo sapiens
acagtgtggayaggtaaaatt

SEQ ID NO: 7499 - DNA, 21 bp, Homo sapiens
ggtcatgaagsctgttacagg

SEQ ID NO: 7500 - DNA, 21 bp, Homo sapiens
gtcctggaggygtaaaacact

SEQ ID NO: 7501 - DNA, 21 bp, Homo sapiens
ggattagcgaraaaagatttc

SEQ ID NO: 7502 - DNA, 21 bp, Homo sapiens
catgaaggagyttattggctg

SEQ ID NO: 7503 - DNA, 21 bp, Homo sapiens
ggcaaataaasatttatcagt

SEQ ID NO: 7504 - DNA, 21 bp, Homo sapiens
agcgtagcatygtccttgctg

SEQ ID NO: 7505 - DNA, 21 bp, Homo sapiens
tgaagaattaygtcagaaatt

SEQ ID NO: 7506 - DNA, 21 bp, Homo sapiens
gttccagaacwaagacaactg

SEQ ID NO: 7507 - DNA, 21 bp, Homo sapiens
caggctccccrtctttggatt

SEQ ID NO: 7508 - DNA, 21 bp, Homo sapiens
tgtctccaaargagaaaaatg

SEQ ID NO: 7509 - DNA, 21 bp, Homo sapiens
ccctccatcayggatttatgg

SEQ ID NO: 7510 - DNA, 21 bp, Homo sapiens
actgatgaagytgaccagatc

SEQ ID NO: 7511 - DNA, 21 bp, Homo sapiens
tccttaaaggyttataagaga

SEQ ID NO: 7512 - DNA, 21 bp, Homo sapiens
aagaattttamggatcataga

SEQ ID NO: 7513 - DNA, 21 bp, Homo sapiens
agataccttcktctttcttct

SEQ ID NO: 7514 - DNA, 21 bp, Homo sapiens
acaaattgcaygaacctaaat

SEQ ID NO: 7515 - DNA, 21 bp, Homo sapiens
gaattataaawgagaccattt

SEQ ID NO: 7516 - DNA, 21 bp, Homo sapiens
ggattgtccartttttttcct

SEQ ID NO: 7517 - DNA, 21 bp, Homo sapiens
gcgaagcatcrtgcaaaaaat

SEQ ID NO: 7518 - DNA, 21 bp, Homo sapiens
ttcttcccttytcccatgtga

SEQ ID NO: 7519 - DNA, 21 bp, Homo sapiens
caatttgtctycaaactgaat

SEQ ID NO: 7520 - DNA, 21 bp, Homo sapiens
gaaataactckcacaaactga

SEQ ID NO: 7521 - DNA, 21 bp, Homo sapiens
catctgtctgygtgattcaga

SEQ ID NO: 7522 - DNA, 21 bp, Homo sapiens
tctgagggggwtgacctagag

SEQ ID NO: 7523 - DNA, 21 bp, Homo sapiens
ggagaataaayatctgcattg

SEQ ID NO: 7524 - DNA, 21 bp, Homo sapiens
aatcaagaggkacatgagaat

SEQ ID NO: 7525 - DNA, 21 bp, Homo sapiens
gctcaaccccyacaatgggaa

SEQ ID NO: 7526 - DNA, 21 bp, Homo sapiens
cattccccacrtgtttaagtt

SEQ ID NO: 7527 - DNA, 21 bp, Homo sapiens
tgtcctagcasttatactgtt

SEQ ID NO: 7528 - DNA, 21 bp, Homo sapiens
ctaaatagacycttctcaagc

SEQ ID NO: 7529 - DNA, 21 bp, Homo sapiens
gcccccagaastcctctctta

SEQ ID NO: 7530 - DNA, 21 bp, Homo sapiens
ctggtataaayaatatctttg

SEQ ID NO: 7531 - DNA, 21 bp, Homo sapiens
tccaactataygcattagaat

SEQ ID NO: 7532 - DNA, 21 bp, Homo sapiens
tctgcttgctkcaggagtgaa

SEQ ID NO: 7533 - DNA, 21 bp, Homo sapiens
cttcataaatytactcatttg

SEQ ID NO: 7534 - DNA, 21 bp, Homo sapiens
tttcaaaattscctaaaatca

SEQ ID NO: 7535 - DNA, 21 bp, Homo sapiens
gacagtgatawctagacacaa

SEQ ID NO: 7536 - DNA, 21 bp, Homo sapiens
ttcatcttacwtagtatactc

SEQ ID NO: 7537 - DNA, 21 bp, Homo sapiens
acttagaagayagtgggaaag

SEQ ID NO: 7538 - DNA, 21 bp, Homo sapiens
cttttgtgcayttaccctaca

SEQ ID NO: 7539 - DNA, 21 bp, Homo sapiens
aacatccattktttttttctt

SEQ ID NO: 7540 - DNA, 21 bp, Homo sapiens
tctaaatatcwcatggccttt

SEQ ID NO: 7541 - DNA, 21 bp, Homo sapiens
caacatagaarataatgccat

SEQ ID NO: 7542 - DNA, 21 bp, Homo sapiens
agactagtttmcctctaatgg

SEQ ID NO: 7543 - DNA, 21 bp, Homo sapiens
tcactctggcyattatcgcat

SEQ ID NO: 7544 - DNA, 21 bp, Homo sapiens
tgaggtttgaraactgacatt

SEQ ID NO: 7545 - DNA, 21 bp, Homo sapiens
agagaaccaaragtaaaccaa

SEQ ID NO: 7546 - DNA, 21 bp, Homo sapiens
acagcagaagwgaagacagga

SEQ ID NO: 7547 - DNA, 21 bp, Homo sapiens
ccaccacatamcaagttctaa

SEQ ID NO: 7548 - DNA, 21 bp, Homo sapiens
cctttgcttcragttgtcctt

SEQ ID NO: 7549 - DNA, 21 bp, Homo sapiens
aaagttgattmtgtttaaaag

SEQ ID NO: 7550 - DNA, 21 bp, Homo sapiens
ccttcttccakaaattcatta

SEQ ID NO: 7551 - DNA, 21 bp, Homo sapiens
aattattgcaytattcattcc

SEQ ID NO: 7552 - DNA, 21 bp, Homo sapiens
aagattttttwaaaaatttgt

SEQ ID NO: 7553 - DNA, 21 bp, Homo sapiens
aaactagaggmtactgtgctg

SEQ ID NO: 7554 - DNA, 21 bp, Homo sapiens
attctgtaaartaacttctct

SEQ ID NO: 7555 - DNA, 21 bp, Homo sapiens
agaaatggggygatacaggaa

SEQ ID NO: 7556 - DNA, 21 bp, Homo sapiens
aggaagagagmgacaaaatta

SEQ ID NO: 7557 - DNA, 21 bp, Homo sapiens
ttgacacactmttggccctgt

SEQ ID NO: 7558 - DNA, 21 bp, Homo sapiens
ggactggggargctgttgtca

SEQ ID NO: 7559 - DNA, 21 bp, Homo sapiens
gaaaagacaarttgcatacag

SEQ ID NO: 7560 - DNA, 21 bp, Homo sapiens
ctgttttcacrtaacctaaaa

SEQ ID NO: 7561 - DNA, 21 bp, Homo sapiens
gttgctggttmttctagaaag

SEQ ID NO: 7562 - DNA, 21 bp, Homo sapiens
agcaaggattrcaaaccaatg

SEQ ID NO: 7563 - DNA, 21 bp, Homo sapiens
ggactcttaaragctgattta

SEQ ID NO: 7564 - DNA, 21 bp, Homo sapiens
ttatgtttcgytgctattaga

SEQ ID NO: 7565 - DNA, 21 bp, Homo sapiens
actgtgcaackcatataattt

SEQ ID NO: 7566 - DNA, 21 bp, Homo sapiens
ttatttatcckcagtttttgc

SEQ ID NO: 7567 - DNA, 21 bp, Homo sapiens
aaggctcagawaaaagtcaat

SEQ ID NO: 7568 - DNA, 21 bp, Homo sapiens
cattttatttmaagtgaagag

SEQ ID NO: 7569 - DNA, 21 bp, Homo sapiens
ttctatgcagrttgacaattg

SEQ ID NO: 7570 - DNA, 21 bp, Homo sapiens
ttttgaatccrtgtgaggctt

SEQ ID NO: 7571 - DNA, 21 bp, Homo sapiens
aagttctctgrtctcagagga

SEQ ID NO: 7572 - DNA, 21 bp, Homo sapiens
ctactaaatgktaggtcaaac

SEQ ID NO: 7573 - DNA, 21 bp, Homo sapiens
taaaaagtttyttatgaagat

SEQ ID NO: 7574 - DNA, 21 bp, Homo sapiens
atgtggaattwctaaggggta

SEQ ID NO: 7575 - DNA, 21 bp, Homo sapiens
aatagtacctsgaggactcgg

SEQ ID NO: 7576 - DNA, 21 bp, Homo sapiens
gtgctgctttwttgtcagagc

SEQ ID NO: 7577 - DNA, 21 bp, Homo sapiens
atgtgacaacycttctaagtt

SEQ ID NO: 7578 - DNA, 21 bp, Homo sapiens
taccagcttawggattccggt

SEQ ID NO: 7579 - DNA, 21 bp, Homo sapiens
tattagtataracatgtacct

SEQ ID NO: 7580 - DNA, 21 bp, Homo sapiens
agccagactcycttgactgtc

SEQ ID NO: 7581 - DNA, 21 bp, Homo sapiens
agtaatctatrgtcaggtgaa

SEQ ID NO: 7582 - DNA, 21 bp, Homo sapiens
cattaatgagytgtctacatt

SEQ ID NO: 7583 - DNA, 21 bp, Homo sapiens
aaaaactgtgkatttctgcaa

SEQ ID NO: 7584 - DNA, 21 bp, Homo sapiens
tcatcagaagycaaggaaagg

SEQ ID NO: 7585 - DNA, 21 bp, Homo sapiens
aatatgtatartaatacaaga

SEQ ID NO: 7586 - DNA, 21 bp, Homo sapiens
gagtttcgctyctggggtcta

SEQ ID NO: 7587 - DNA, 21 bp, Homo sapiens
tccagtgtgaygatctgaaaa

SEQ ID NO: 7588 - DNA, 21 bp, Homo sapiens
acaatggtackctgattcatg

SEQ ID NO: 7589 - DNA, 21 bp, Homo sapiens
tttaaatggcrtaactccacc

SEQ ID NO: 7590 - DNA, 21 bp, Homo sapiens
ataagaaaccragttctgtgg

SEQ ID NO: 7591 - DNA, 21 bp, Homo sapiens
gtgagagactrgagtctggtt

SEQ ID NO: 7592 - DNA, 21 bp, Homo sapiens
agttcctgtgyatcagtagtg

SEQ ID NO: 7593 - DNA, 21 bp, Homo sapiens
caaatattatrccatccatat

SEQ ID NO: 7594 - DNA, 21 bp, Homo sapiens
aagttttctcyttcctcaata

SEQ ID NO: 7595 - DNA, 21 bp, Homo sapiens
gatattggagrgatcttgtag

SEQ ID NO: 7596 - DNA, 21 bp, Homo sapiens
attgaaaaatygtttggccca

SEQ ID NO: 7597 - DNA, 21 bp, Homo sapiens
tggggtccaakgtttttatgg

SEQ ID NO: 7598 - DNA, 21 bp, Homo sapiens
caggttattaytgtattttgt

SEQ ID NO: 7599 - DNA, 21 bp, Homo sapiens
tatatctccarattaatcccg

SEQ ID NO: 7600 - DNA, 21 bp, Homo sapiens
agctgtgacartcttgactat

SEQ ID NO: 7601 - DNA, 21 bp, Homo sapiens
tctaatcctgraatgtgtggg

SEQ ID NO: 7602 - DNA, 21 bp, Homo sapiens
cagattgctarcttttttatt

SEQ ID NO: 7603 - DNA, 21 bp, Homo sapiens
catcagaaggrtagatgtagg

SEQ ID NO: 7604 - DNA, 21 bp, Homo sapiens
cttgtaattawccccagttaa

SEQ ID NO: 7605 - DNA, 21 bp, Homo sapiens
tggccattttytaccacgtag

SEQ ID NO: 7606 - DNA, 21 bp, Homo sapiens
accagaaaaaytgtttgaaac

SEQ ID NO: 7607 - DNA, 21 bp, Homo sapiens
tactaagtacmttctgtaaca

SEQ ID NO: 7608 - DNA, 21 bp, Homo sapiens
taagaagtagwccaagatatg

SEQ ID NO: 7609 - DNA, 21 bp, Homo sapiens
agatctgtttyttggacatca

SEQ ID NO: 7610 - DNA, 21 bp, Homo sapiens
atgaattagtwtgagaaattc

SEQ ID NO: 7611 - DNA, 21 bp, Homo sapiens
ttcactcgtgytgttcttttg

SEQ ID NO: 7612 - DNA, 21 bp, Homo sapiens
cattgtcagcmccaagtcaaa

SEQ ID NO: 7613 - DNA, 21 bp, Homo sapiens
tctgagctatrtagcttgcgt

SEQ ID NO: 7614 - DNA, 21 bp, Homo sapiens
tttcgtacctrttatccctgt

SEQ ID NO: 7615 - DNA, 21 bp, Homo sapiens
ccacaggtttyggttttgtta

SEQ ID NO: 7616 - DNA, 21 bp, Homo sapiens
catgcaattaycaagcatttt

SEQ ID NO: 7617 - DNA, 21 bp, Homo sapiens
aaattaatggygaagcatctg

SEQ ID NO: 7618 - DNA, 21 bp, Homo sapiens
ccaccacaccrataatagaag

SEQ ID NO: 7619 - DNA, 21 bp, Homo sapiens
ttttatttgartcttttttga

SEQ ID NO: 7620 - DNA, 21 bp, Homo sapiens
aattgtgacgrgaaggttgca

SEQ ID NO: 7621 - DNA, 21 bp, Homo sapiens
cccttgagtgyctcataaggg

SEQ ID NO: 7622 - DNA, 21 bp, Homo sapiens
ataatttaccrgctttgtctg

SEQ ID NO: 7623 - DNA, 21 bp, Homo sapiens
ttaaatttccsgaactccacc

SEQ ID NO: 7624 - DNA, 21 bp, Homo sapiens
aaagggcatascctcgaagct

SEQ ID NO: 7625 - DNA, 21 bp, Homo sapiens
tcctcaccctwctcacatgaa

SEQ ID NO: 7626 - DNA, 21 bp, Homo sapiens
ctagccgactycccttggtat

SEQ ID NO: 7627 - DNA, 21 bp, Homo sapiens
acaaaacataygcatgactgg

SEQ ID NO: 7628 - DNA, 21 bp, Homo sapiens
actgctgctasacccagggga

SEQ ID NO: 7629 - DNA, 21 bp, Homo sapiens
acagatgattrgagggagaaa

SEQ ID NO: 7630 - DNA, 21 bp, Homo sapiens
catttttttayagtctgtcaa

SEQ ID NO: 7631 - DNA, 21 bp, Homo sapiens
ttcctgtatgwtcagtatgct

SEQ ID NO: 7632 - DNA, 21 bp, Homo sapiens
aactattgaaktcaggaactg

SEQ ID NO: 7633 - DNA, 21 bp, Homo sapiens
atcagccaggraagtagtagt

SEQ ID NO: 7634 - DNA, 21 bp, Homo sapiens
ctctaattctytctgaaaaga

SEQ ID NO: 7635 - DNA, 21 bp, Homo sapiens
agctccatccmcattgccaca

SEQ ID NO: 7636 - DNA, 21 bp, Homo sapiens
ttctaattggyttgtagtcct

SEQ ID NO: 7637 - DNA, 21 bp, Homo sapiens
tagaaatgtcrtctgagagct

SEQ ID NO: 7638 - DNA, 21 bp, Homo sapiens
tttttagtccrtttcatttag

SEQ ID NO: 7639 - DNA, 21 bp, Homo sapiens
tccatggtggsaatgtaaaat

SEQ ID NO: 7640 - DNA, 21 bp, Homo sapiens
tttgattgccwctctactcac

SEQ ID NO: 7641 - DNA, 21 bp, Homo sapiens
tagaataaaastttgctgcta

SEQ ID NO: 7642 - DNA, 21 bp, Homo sapiens
catttataatwctagccaata

SEQ ID NO: 7643 - DNA, 21 bp, Homo sapiens
ttgaaaaatgyaagtaacatg

SEQ ID NO: 7644 - DNA, 21 bp, Homo sapiens
gggcatgaaaraagatattcc

SEQ ID NO: 7645 - DNA, 21 bp, Homo sapiens
tgtgaccttcstaagttgttg

SEQ ID NO: 7646 - DNA, 21 bp, Homo sapiens
cagatttaccwtagtgtttga

SEQ ID NO: 7647 - DNA, 21 bp, Homo sapiens
aaaattgtgtrtggttgctag

SEQ ID NO: 7648 - DNA, 21 bp, Homo sapiens
ctactaacacrctgatgagaa

SEQ ID NO: 7649 - DNA, 21 bp, Homo sapiens
ttatctcttaycactgctcca

SEQ ID NO: 7650 - DNA, 21 bp, Homo sapiens
actcaatatgkgtcctgtttt

SEQ ID NO: 7651 - DNA, 21 bp, Homo sapiens
tttttctaccygtaaatacca

SEQ ID NO: 7652 - DNA, 21 bp, Homo sapiens
tgatggtggcrttgattaaag

SEQ ID NO: 7653 - DNA, 21 bp, Homo sapiens
ctcgaggtagwtctaaatttc

SEQ ID NO: 7654 - DNA, 21 bp, Homo sapiens
atgggtaattkcagtaactac

SEQ ID NO: 7655 - DNA, 21 bp, Homo sapiens
cacttttgaarctacaaactt

SEQ ID NO: 7656 - DNA, 21 bp, Homo sapiens
ttctgaattarcagaacttaa

SEQ ID NO: 7657 - DNA, 21 bp, Homo sapiens
taatcaaccayatatgaagga

SEQ ID NO: 7658 - DNA, 21 bp, Homo sapiens
caactttaacractctttgct

SEQ ID NO: 7659 - DNA, 21 bp, Homo sapiens
tcaaaccatarccagctttaa

SEQ ID NO: 7660 - DNA, 21 bp, Homo sapiens
ctgcattttaktgaaacattc

SEQ ID NO: 7661 - DNA, 21 bp, Homo sapiens
atgggacacckccattaaaaa

SEQ ID NO: 7662 - DNA, 21 bp, Homo sapiens
gaataaagctrtaagtttatc

SEQ ID NO: 7663 - DNA, 21 bp, Homo sapiens
aaatactggaycatgtggaaa

SEQ ID NO: 7664 - DNA, 21 bp, Homo sapiens
tagaagtgatmgatatccatt

SEQ ID NO: 7665 - DNA, 21 bp, Homo sapiens
caaataaaacrtatatatttt

SEQ ID NO: 7666 - DNA, 21 bp, Homo sapiens
taaatcacggrgaaaacaaaa

SEQ ID NO: 7667 - DNA, 21 bp, Homo sapiens
accctccatcrtcttgtcttt

SEQ ID NO: 7668 - DNA, 21 bp, Homo sapiens
aaaagacaaayattgtataat

SEQ ID NO: 7669 - DNA, 21 bp, Homo sapiens
gctcaggttgwagcaaatcta

SEQ ID NO: 7670 - DNA, 21 bp, Homo sapiens
tttttcttttytcatgatgaa

SEQ ID NO: 7671 - DNA, 21 bp, Homo sapiens
gagcctgcacygtcccagctt

SEQ ID NO: 7672 - DNA, 21 bp, Homo sapiens
tttattactayaggcataaat

SEQ ID NO: 7673 - DNA, 21 bp, Homo sapiens
ttatttctgtrtgtgtaaatt

SEQ ID NO: 7674 - DNA, 21 bp, Homo sapiens
tcaccaaaatygcatttttgt

SEQ ID NO: 7675 - DNA, 21 bp, Homo sapiens
atcaagatatygaaaatagaa

SEQ ID NO: 7676 - DNA, 21 bp, Homo sapiens
tgaggataatyaccgaatgtt

SEQ ID NO: 7677 - DNA, 21 bp, Homo sapiens
agttcaataasatggaagata

SEQ ID NO: 7678 - DNA, 21 bp, Homo sapiens
atgtatgactrtttttaaaga

SEQ ID NO: 7679 - DNA, 21 bp, Homo sapiens
tgcagtataaygggcttacat

SEQ ID NO: 7680 - DNA, 21 bp, Homo sapiens
tattccaattmgttgtgaact

SEQ ID NO: 7681 - DNA, 21 bp, Homo sapiens
gtctagactawtttttttcta

SEQ ID NO: 7682 - DNA, 21 bp, Homo sapiens
tgtatctcttrtttctggcat

SEQ ID NO: 7683 - DNA, 21 bp, Homo sapiens
ttcataactgrccccacgtgc

SEQ ID NO: 7684 - DNA, 21 bp, Homo sapiens
gtggaaaattmtcagcaaata

SEQ ID NO: 7685 - DNA, 21 bp, Homo sapiens
aatcactgacyattgaaagta

SEQ ID NO: 7686 - DNA, 21 bp, Homo sapiens
cacgatccacrggaaccactg

SEQ ID NO: 7687 - DNA, 21 bp, Homo sapiens
caactatgtcwtctgtggata

SEQ ID NO: 7688 - DNA, 21 bp, Homo sapiens
tggaaagactratacaatcta

SEQ ID NO: 7689 - DNA, 21 bp, Homo sapiens
gcagactgtgyagggagcttg

SEQ ID NO: 7690 - DNA, 21 bp, Homo sapiens
tagcagttttmtttgtagtat

SEQ ID NO: 7691 - DNA, 21 bp, Homo sapiens
cacaagccagktgtacaaatt

SEQ ID NO: 7692 - DNA, 21 bp, Homo sapiens
ccttcaggccratatgtaaat

SEQ ID NO: 7693 - DNA, 21 bp, Homo sapiens
aaaaatctaaygattaagaga

SEQ ID NO: 7694 - DNA, 21 bp, Homo sapiens
tcaggtactgmactttgaaat

SEQ ID NO: 7695 - DNA, 21 bp, Homo sapiens
atttactttgrtgttgattct

SEQ ID NO: 7696 - DNA, 21 bp, Homo sapiens
aattataagcrttgaacagca

SEQ ID NO: 7697 - DNA, 21 bp, Homo sapiens
gctgtgaaaaygagtctcaat

SEQ ID NO: 7698 - DNA, 21 bp, Homo sapiens
cacaggctatwtctatttttg

SEQ ID NO: 7699 - DNA, 21 bp, Homo sapiens
gttgtgtttgrattttagtac

SEQ ID NO: 7700 - DNA, 21 bp, Homo sapiens
aatttaaaaaraagaagaaaa

SEQ ID NO: 7701 - DNA, 21 bp, Homo sapiens
ttttttcactkttgccctaaa

SEQ ID NO: 7702 - DNA, 21 bp, Homo sapiens
gacaaattatytgactacttt

SEQ ID NO: 7703 - DNA, 21 bp, Homo sapiens
ctagaatgagygtgtgatgac

SEQ ID NO: 7704 - DNA, 21 bp, Homo sapiens
gaatctatctyagaagactca

SEQ ID NO: 7705 - DNA, 21 bp, Homo sapiens
actaataacargctctttaca

SEQ ID NO: 7706 - DNA, 21 bp, Homo sapiens
ctatacataayaccaccattg

SEQ ID NO: 7707 - DNA, 21 bp, Homo sapiens
tatttgcagamcacatatcta

SEQ ID NO: 7708 - DNA, 21 bp, Homo sapiens
cgtgtcttacytaaggaggtc

SEQ ID NO: 7709 - DNA, 21 bp, Homo sapiens
ctcaaaacatygagcaaatcc

SEQ ID NO: 7710 - DNA, 21 bp, Homo sapiens
gcaaagaaatsaatatctatt

SEQ ID NO: 7711 - DNA, 21 bp, Homo sapiens
accagtaagasagagctgaac

SEQ ID NO: 7712 - DNA, 21 bp, Homo sapiens
aaaggtgtaaytgaggatatt

SEQ ID NO: 7713 - DNA, 21 bp, Homo sapiens
atgcttatttmtgcacctgct

SEQ ID NO: 7714 - DNA, 21 bp, Homo sapiens
agaactttccratgggcaagc

SEQ ID NO: 7715 - DNA, 21 bp, Homo sapiens
accccatttaygatgtggaga

SEQ ID NO: 7716 - DNA, 21 bp, Homo sapiens
taaattaaaaytcaaaacatg

SEQ ID NO: 7717 - DNA, 21 bp, Homo sapiens
caacttttatkgattctgagg

SEQ ID NO: 7718 - DNA, 21 bp, Homo sapiens
ctatcagtcarctgtctgctt

SEQ ID NO: 7719 - DNA, 21 bp, Homo sapiens
tcaaatgattrtatagtcaga

SEQ ID NO: 7720 - DNA, 21 bp, Homo sapiens
gactaacagtrtctgtcaaat

SEQ ID NO: 7721 - DNA, 21 bp, Homo sapiens
tggaacatccmagtgggaaca

SEQ ID NO: 7722 - DNA, 21 bp, Homo sapiens
acagggactgyctaaagggcc

SEQ ID NO: 7723 - DNA, 21 bp, Homo sapiens
caggtcaccargggagttcgt

SEQ ID NO: 7724 - DNA, 21 bp, Homo sapiens
ctgaatgaagsatgccctgag

SEQ ID NO: 7725 - DNA, 21 bp, Homo sapiens
acccactggcyggctatcttc

SEQ ID NO: 7726 - DNA, 21 bp, Homo sapiens
cgctgttgttrttctcttcct

SEQ ID NO: 7727 - DNA, 21 bp, Homo sapiens
atgctgaaacrcacaggattc

SEQ ID NO: 7728 - DNA, 21 bp, Homo sapiens
accataaaaamaaaataatga

SEQ ID NO: 7729 - DNA, 21 bp, Homo sapiens
tttctccacarggatccaaaa

SEQ ID NO: 7730 - DNA, 21 bp, Homo sapiens
tattactcaaycatatctaat

SEQ ID NO: 7731 - DNA, 21 bp, Homo sapiens
tttaatttttrgattttactg

SEQ ID NO: 7732 - DNA, 21 bp, Homo sapiens
cctgtccccasatttccaaaa

SEQ ID NO: 7733 - DNA, 21 bp, Homo sapiens
tcacctctttyctgctgagac

SEQ ID NO: 7734 - DNA, 21 bp, Homo sapiens
tgctttatctrctttcagttt

SEQ ID NO: 7735 - DNA, 21 bp, Homo sapiens
gctccaacackgatgaacctc

SEQ ID NO: 7736 - DNA, 21 bp, Homo sapiens
cttccctcacracatcgatca

SEQ ID NO: 7737 - DNA, 21 bp, Homo sapiens
cgtgctcagaraggccatgga

SEQ ID NO: 7738 - DNA, 21 bp, Homo sapiens
actcagtgacrgcagtatctt

SEQ ID NO: 7739 - DNA, 21 bp, Homo sapiens
gcgttacaggrgaaaggacga

SEQ ID NO: 7740 - DNA, 21 bp, Homo sapiens
agctaatgacrttgtcccaaa

SEQ ID NO: 7741 - DNA, 21 bp, Homo sapiens
tcgtccaagcyccctagactc

SEQ ID NO: 7742 - DNA, 21 bp, Homo sapiens
acaagctatcmtcaggcccac

SEQ ID NO: 7743 - DNA, 21 bp, Homo sapiens
acatttaaatygacattctgc

SEQ ID NO: 7744 - DNA, 21 bp, Homo sapiens
gggtctgtgcrggaaggagcc

SEQ ID NO: 7745 - DNA, 21 bp, Homo sapiens
gagagggaagragacttgcct

SEQ ID NO: 7746 - DNA, 21 bp, Homo sapiens
cccctccccgmaaaaaaccgc

SEQ ID NO: 7747 - DNA, 21 bp, Homo sapiens
gggaccttccrtctgtggagt

SEQ ID NO: 7748 - DNA, 21 bp, Homo sapiens
ctccaggggtrttcctggaag

SEQ ID NO: 7749 - DNA, 21 bp, Homo sapiens
tggagcacagrggaagctgtg

SEQ ID NO: 7750 - DNA, 21 bp, Homo sapiens
aatgtggggtrgaaaataact

SEQ ID NO: 7751 - DNA, 21 bp, Homo sapiens
ggattacatgyctaacaggaa

SEQ ID NO: 7752 - DNA, 21 bp, Homo sapiens
gactgtcttayattcaaaaag

SEQ ID NO: 7753 - DNA, 21 bp, Homo sapiens
aattaaatgasaaaatgaaga

SEQ ID NO: 7754 - DNA, 21 bp, Homo sapiens
ggcatctctcrtaataaaata

SEQ ID NO: 7755 - DNA, 21 bp, Homo sapiens
ttggcttcctrccacatctag

SEQ ID NO: 7756 - DNA, 21 bp, Homo sapiens
tgtataactgraaaactccag

SEQ ID NO: 7757 - DNA, 21 bp, Homo sapiens
gagcttgcccmtgagccacag

SEQ ID NO: 7758 - DNA, 21 bp, Homo sapiens
tggcaaacctrtctctcctgc

SEQ ID NO: 7759 - DNA, 21 bp, Homo sapiens
agtaagctacraatggagaga

SEQ ID NO: 7760 - DNA, 21 bp, Homo sapiens
tgctacacatrtggaggataa

SEQ ID NO: 7761 - DNA, 21 bp, Homo sapiens
caccactcacsaggggctggg

SEQ ID NO: 7762 - DNA, 21 bp, Homo sapiens
atcaaagaaasgaagtgaaag

SEQ ID NO: 7763 - DNA, 21 bp, Homo sapiens
gacacggccaygtataaacat

SEQ ID NO: 7764 - DNA, 21 bp, Homo sapiens
gcttttttttwaaaagctctt

SEQ ID NO: 7765 - DNA, 21 bp, Homo sapiens
catgtcacctygggggcactg

SEQ ID NO: 7766 - DNA, 21 bp, Homo sapiens
ttttcaagggmcatggtttta

SEQ ID NO: 7767 - DNA, 21 bp, Homo sapiens
gctggtaaccrcaggccccat

SEQ ID NO: 7768 - DNA, 21 bp, Homo sapiens
tgagagaccgrggcagaagtg

SEQ ID NO: 7769 - DNA, 21 bp, Homo sapiens
gcgtgtattcygtaatgatct

SEQ ID NO: 7770 - DNA, 21 bp, Homo sapiens
atgggggatcscacactcccc

SEQ ID NO: 7771 - DNA, 21 bp, Homo sapiens
tcagaaaaacstttctgcaac

SEQ ID NO: 7772 - DNA, 21 bp, Homo sapiens
cagaggactcragcccacatc

SEQ ID NO: 7773 - DNA, 21 bp, Homo sapiens
cagagagaaaygaatgcggag

SEQ ID NO: 7774 - DNA, 21 bp, Homo sapiens
tcagatgttasagactcccag

SEQ ID NO: 7775 - DNA, 21 bp, Homo sapiens
cctgtaatgcrcctcatatct

SEQ ID NO: 7776 - DNA, 21 bp, Homo sapiens
gggaaaccccygtacctgcca

SEQ ID NO: 7777 - DNA, 21 bp, Homo sapiens
cagagccctcrgcctcccttc

SEQ ID NO: 7778 - DNA, 21 bp, Homo sapiens
cttatacagaraaaaaaaaaa

SEQ ID NO: 7779 - DNA, 21 bp, Homo sapiens
aaaattaaacrtggggtcacc

SEQ ID NO: 7780 - DNA, 21 bp, Homo sapiens
ttctcattctratctttcttg

SEQ ID NO: 7781 - DNA, 21 bp, Homo sapiens
tccattgaccrcaacacttca

SEQ ID NO: 7782 - DNA, 21 bp, Homo sapiens
gagggagaagrcactttggtt

SEQ ID NO: 7783 - DNA, 21 bp, Homo sapiens
agaggtgcaawtcacctgggt

SEQ ID NO: 7784 - DNA, 21 bp, Homo sapiens
gcatctggcayctgctgtcct

SEQ ID NO: 7785 - DNA, 21 bp, Homo sapiens
tctaaattctytctcctgcag

SEQ ID NO: 7786 - DNA, 21 bp, Homo sapiens
tctaatcctgscatagcacct

SEQ ID NO: 7787 - DNA, 21 bp, Homo sapiens
ttcgactcacrgccaactatt

SEQ ID NO: 7788 - DNA, 21 bp, Homo sapiens
ttgcaggtgcycacccccttt

SEQ ID NO: 7789 - DNA, 21 bp, Homo sapiens
ctcagtaaatrttccagtaga

SEQ ID NO: 7790 - DNA, 21 bp, Homo sapiens
ctccacctgcrttctgggtag

SEQ ID NO: 7791 - DNA, 21 bp, Homo sapiens
agtttgagcaragttacggta

SEQ ID NO: 7792 - DNA, 21 bp, Homo sapiens
gggaaacagasgactggccac

SEQ ID NO: 7793 - DNA, 21 bp, Homo sapiens
aggtgtgcagracccgaggcc

SEQ ID NO: 7794 - DNA, 21 bp, Homo sapiens
tgcagaccacrgtttagagaa

SEQ ID NO: 7795 - DNA, 21 bp, Homo sapiens
acagaaaggcwaagattcaca

SEQ ID NO: 7796 - DNA, 21 bp, Homo sapiens
tcaacacgctkgcacaattgc

SEQ ID NO: 7797 - DNA, 21 bp, Homo sapiens
ctgagtagccyagtccagacc

SEQ ID NO: 7798 - DNA, 21 bp, Homo sapiens
ccactcttgcycttccctggg

SEQ ID NO: 7799 - DNA, 21 bp, Homo sapiens
gctggctcatscaaaacatga

SEQ ID NO: 7800 - DNA, 21 bp, Homo sapiens
ggcagtccaayttgaatcctg

SEQ ID NO: 7801 - DNA, 21 bp, Homo sapiens
gcagagtcccragaacaggag

SEQ ID NO: 7802 - DNA, 21 bp, Homo sapiens
cacaccaaccraggccagccc

SEQ ID NO: 7803 - DNA, 21 bp, Homo sapiens
gatgacttggycaatcccatc

SEQ ID NO: 7804 - DNA, 21 bp, Homo sapiens
ggcctgcccayccgcaccagg

SEQ ID NO: 7805 - DNA, 21 bp, Homo sapiens
tcccggctgtraagtgggggt

SEQ ID NO: 7806 - DNA, 21 bp, Homo sapiens
acttttcaccmctcatttttt

SEQ ID NO: 7807 - DNA, 21 bp, Homo sapiens
gaatacatgcyacctcagagt

SEQ ID NO: 7808 - DNA, 21 bp, Homo sapiens
cttaaacacaygcctcagccc

SEQ ID NO: 7809 - DNA, 21 bp, Homo sapiens
aaatcggtagrggcagtggag

SEQ ID NO: 7810 - DNA, 21 bp, Homo sapiens
actctccaagycctccctgtc

SEQ ID NO: 7811 - DNA, 21 bp, Homo sapiens
cagagtatttyttcccccatt

SEQ ID NO: 7812 - DNA, 21 bp, Homo sapiens
aaacagtcacytcataaaggt

SEQ ID NO: 7813 - DNA, 21 bp, Homo sapiens
agcttgatgcraaagggccac

SEQ ID NO: 7814 - DNA, 21 bp, Homo sapiens
gcggatgcaayagaccactgg

SEQ ID NO: 7815 - DNA, 21 bp, Homo sapiens
ttggagaaacrcaatctggtt

SEQ ID NO: 7816 - DNA, 21 bp, Homo sapiens
aaacaggtgtyttgggtttgc

SEQ ID NO: 7817 - DNA, 21 bp, Homo sapiens
atttttgataytagtaattta

SEQ ID NO: 7818 - DNA, 21 bp, Homo sapiens
caatttatatktttcccttgc

SEQ ID NO: 7819 - DNA, 21 bp, Homo sapiens
acttataaaaygtcccaaggg

SEQ ID NO: 7820 - DNA, 21 bp, Homo sapiens
aggcccgttgrgaggaggaag

SEQ ID NO: 7821 - DNA, 21 bp, Homo sapiens
aagctctttayctagcagagc

SEQ ID NO: 7822 - DNA, 21 bp, Homo sapiens
gaagctggacrttggatttgg

SEQ ID NO: 7823 - DNA, 21 bp, Homo sapiens
cggtctctgayagaaacactt

SEQ ID NO: 7824 - DNA, 21 bp, Homo sapiens
caaaggtctcrtcagcaggag

SEQ ID NO: 7825 - DNA, 21 bp, Homo sapiens
cgtggcccccmaagaaatacg

SEQ ID NO: 7826 - DNA, 21 bp, Homo sapiens
aaagatgttgygagtagcatc

SEQ ID NO: 7827 - DNA, 21 bp, Homo sapiens
tactacaaaaytgcacgacta

SEQ ID NO: 7828 - DNA, 21 bp, Homo sapiens
ggagattaaartaaagtcttt

SEQ ID NO: 7829 - DNA, 21 bp, Homo sapiens
acacctctttkgggcaaacct

SEQ ID NO: 7830 - DNA, 21 bp, Homo sapiens
agtcctctctmgagtccttct

SEQ ID NO: 7831 - DNA, 21 bp, Homo sapiens
gccaaccccaraaagatcaga

SEQ ID NO: 7832 - DNA, 21 bp, Homo sapiens
gatagtgggtrgtgggcaggg

SEQ ID NO: 7833 - DNA, 21 bp, Homo sapiens
aattagaatgractgatatgg

SEQ ID NO: 7834 - DNA, 21 bp, Homo sapiens
gaacccaaaaraccatgggaa

SEQ ID NO: 7835 - DNA, 21 bp, Homo sapiens
gctgaggctgkaaccagctct

SEQ ID NO: 7836 - DNA, 21 bp, Homo sapiens
ttcatcctccrtggccttagt

SEQ ID NO: 7837 - DNA, 21 bp, Homo sapiens
ccacataaatsataatgcaca

SEQ ID NO: 7838 - DNA, 21 bp, Homo sapiens
tgcctggtgtrtggtagacac

SEQ ID NO: 7839 - DNA, 21 bp, Homo sapiens
tttgtacagayttagaatttt

SEQ ID NO: 7840 - DNA, 21 bp, Homo sapiens
aaagatatcayatgaaaacta

SEQ ID NO: 7841 - DNA, 21 bp, Homo sapiens
taatataagaycctccttggc

SEQ ID NO: 7842 - DNA, 21 bp, Homo sapiens
tttctcccagraggaagagac

SEQ ID NO: 7843 - DNA, 21 bp, Homo sapiens
cggttcatccrcctctacgtc

SEQ ID NO: 7844 - DNA, 21 bp, Homo sapiens
aatcaagctcyaccagactct

SEQ ID NO: 7845 - DNA, 21 bp, Homo sapiens
ggtgtgcccaygaggaggacg

SEQ ID NO: 7846 - DNA, 21 bp, Homo sapiens
actttttcatragccactggc

SEQ ID NO: 7847 - DNA, 21 bp, Homo sapiens
gaaagtgctaytctcattcac

SEQ ID NO: 7848 - DNA, 21 bp, Homo sapiens
gaagtgcaagscagacgggat

SEQ ID NO: 7849 - DNA, 21 bp, Homo sapiens
gggctgggctyatggtgcaga

SEQ ID NO: 7850 - DNA, 21 bp, Homo sapiens
tgtggagaagytgcagaataa

SEQ ID NO: 7851 - DNA, 21 bp, Homo sapiens
tcaataagctrcctgaagtga

SEQ ID NO: 7852 - DNA, 21 bp, Homo sapiens
atcgaggctcrttcgttggct

SEQ ID NO: 7853 - DNA, 21 bp, Homo sapiens
gagagaggacrcggccctggc

SEQ ID NO: 7854 - DNA, 21 bp, Homo sapiens
ccttctgtcgycccaactgtt

SEQ ID NO: 7855 - DNA, 21 bp, Homo sapiens
tccaaagttgragaggacttt

SEQ ID NO: 7856 - DNA, 21 bp, Homo sapiens
gaaaaccaccwacttcaattc

SEQ ID NO: 7857 - DNA, 21 bp, Homo sapiens
tgcagacattkgcagagtccc

SEQ ID NO: 7858 - DNA, 21 bp, Homo sapiens
aaatgtgagamtaaaccatca

SEQ ID NO: 7859 - DNA, 21 bp, Homo sapiens
cttcgcaaatytcatctctgg

SEQ ID NO: 7860 - DNA, 21 bp, Homo sapiens
tctagccccartgacttcatt

SEQ ID NO: 7861 - DNA, 21 bp, Homo sapiens
cccccagaacrtaagctgctg

SEQ ID NO: 7862 - DNA, 21 bp, Homo sapiens
tgcacgccacrtgtaatttca

SEQ ID NO: 7863 - DNA, 21 bp, Homo sapiens
caaccccaagrgatagggaca

SEQ ID NO: 7864 - DNA, 21 bp, Homo sapiens
tctggggaggrgaaatgagaa

SEQ ID NO: 7865 - DNA, 21 bp, Homo sapiens
gatcatgggargctgaactga

SEQ ID NO: 7866 - DNA, 21 bp, Homo sapiens
atacgcaccayggaatactac

SEQ ID NO: 7867 - DNA, 21 bp, Homo sapiens
ggatggatgcsggggctggga

SEQ ID NO: 7868 - DNA, 21 bp, Homo sapiens
tgcacaacatygtgaatgcag

SEQ ID NO: 7869 - DNA, 21 bp, Homo sapiens
ggcaggcatargggtatttct

SEQ ID NO: 7870 - DNA, 21 bp, Homo sapiens
ctgtacccagrtcctcccagg

SEQ ID NO: 7871 - DNA, 21 bp, Homo sapiens
cagaggggaasaggctgacct

SEQ ID NO: 7872 - DNA, 21 bp, Homo sapiens
gggctgcagasaatgggacaa

SEQ ID NO: 7873 - DNA, 21 bp, Homo sapiens
gtggatgtacytcatgccact

SEQ ID NO: 7874 - DNA, 21 bp, Homo sapiens
tgggcttcttrgcttcaaatc

SEQ ID NO: 7875 - DNA, 21 bp, Homo sapiens
tcagaccaggracagcacaga

SEQ ID NO: 7876 - DNA, 21 bp, Homo sapiens
ccccctgcacrgtccacctgg

SEQ ID NO: 7877 - DNA, 21 bp, Homo sapiens
acggacatgayggtgacgtgc

SEQ ID NO: 7878 - DNA, 21 bp, Homo sapiens
gcctgtccccmtctctccctg

SEQ ID NO: 7879 - DNA, 21 bp, Homo sapiens
gaaaacagagyccccaccaaa

SEQ ID NO: 7880 - DNA, 21 bp, Homo sapiens
gatggaacctragagctgggc

SEQ ID NO: 7881 - DNA, 21 bp, Homo sapiens
atgtgggggaraaacccaagt

SEQ ID NO: 7882 - DNA, 21 bp, Homo sapiens
tctgcagagcygcaggtctcc

SEQ ID NO: 7883 - DNA, 21 bp, Homo sapiens
ccagcgggttrctctgactta

SEQ ID NO: 7884 - DNA, 21 bp, Homo sapiens
cctgggacagygccacgttcc

SEQ ID NO: 7885 - DNA, 21 bp, Homo sapiens
cctctgtacgsatgagaggtc

SEQ ID NO: 7886 - DNA, 21 bp, Homo sapiens
caagcggcagrgctgggcgga

SEQ ID NO: 7887 - DNA, 21 bp, Homo sapiens
ctgcccaccasagcttacttt

SEQ ID NO: 7888 - DNA, 21 bp, Homo sapiens
tgaacgggacmtatttgagaa

SEQ ID NO: 7889 - DNA, 21 bp, Homo sapiens
gaaggcttcckccccgaaggg

SEQ ID NO: 7890 - DNA, 21 bp, Homo sapiens
gggagggaggracaatcaggg

SEQ ID NO: 7891 - DNA, 21 bp, Homo sapiens
tgttcctcacyttatcctctc

SEQ ID NO: 7892 - DNA, 21 bp, Homo sapiens
tgaaacaaagwcagggttcca

SEQ ID NO: 7893 - DNA, 21 bp, Homo sapiens
ttttttgcttyttcgtcattt

SEQ ID NO: 7894 - DNA, 21 bp, Homo sapiens
ccaggtgactsctgctgagca

SEQ ID NO: 7895 - DNA, 21 bp, Homo sapiens
caccccactaracccaaacca

SEQ ID NO: 7896 - DNA, 21 bp, Homo sapiens
cagcagctccraagtgggagg

SEQ ID NO: 7897 - DNA, 21 bp, Homo sapiens
ctgccaccacrtggtcactac

SEQ ID NO: 7898 - DNA, 21 bp, Homo sapiens
tccagctgtgkcaggtaccca

SEQ ID NO: 7899 - DNA, 21 bp, Homo sapiens
gcggccgcatsactccagtct

SEQ ID NO: 7900 - DNA, 21 bp, Homo sapiens
agctgcagcargcactgattt

SEQ ID NO: 7901 - DNA, 21 bp, Homo sapiens
ctcgcaatatytactcccctc

SEQ ID NO: 7902 - DNA, 21 bp, Homo sapiens
tctctgagccycagacttctc

SEQ ID NO: 7903 - DNA, 21 bp, Homo sapiens
tccatccctgygctagttcca

SEQ ID NO: 7904 - DNA, 21 bp, Homo sapiens
acaaaaagtaycggaaaacca

SEQ ID NO: 7905 - DNA, 21 bp, Homo sapiens
tttgcacggcrtaaggctcct

SEQ ID NO: 7906 - DNA, 21 bp, Homo sapiens
ctttcttttcwacctttcaat

SEQ ID NO: 7907 - DNA, 21 bp, Homo sapiens
cccttcgtgcwtctgctcatg

SEQ ID NO: 7908 - DNA, 21 bp, Homo sapiens
ccttcgtgctwctgctcatga

SEQ ID NO: 7909 - DNA, 21 bp, Homo sapiens
atcatttcttsgtgttgggac

SEQ ID NO: 7910 - DNA, 21 bp, Homo sapiens
gcgctgttacrgctctcagca

SEQ ID NO: 7911 - DNA, 21 bp, Homo sapiens
ttgatatctgyggctgaactg

SEQ ID NO: 7912 - DNA, 21 bp, Homo sapiens
atgccaatttrttatccaact

SEQ ID NO: 7913 - DNA, 21 bp, Homo sapiens
tttgttgttcratccacccaa

SEQ ID NO: 7914 - DNA, 21 bp, Homo sapiens
ttctgcatgtsctcattaaat

SEQ ID NO: 7915 - DNA, 21 bp, Homo sapiens
ccactaaagartgaaattgtc

SEQ ID NO: 7916 - DNA, 21 bp, Homo sapiens
tctaatcttartctaatgatt

SEQ ID NO: 7917 - DNA, 21 bp, Homo sapiens
aatcttaatckaatgattttg

SEQ ID NO: 7918 - DNA, 21 bp, Homo sapiens
cttttccttcytcttttggat

SEQ ID NO: 7919 - DNA, 21 bp, Homo sapiens
tttacttccayattttcagtg

SEQ ID NO: 7920 - DNA, 21 bp, Homo sapiens
ttgtctaatartctttaatgg

SEQ ID NO: 7921 - DNA, 21 bp, Homo sapiens
tcattcagagrctcaagagga

SEQ ID NO: 7922 - DNA, 21 bp, Homo sapiens
gtgccaagtcrtcatagagtt

SEQ ID NO: 7923 - DNA, 21 bp, Homo sapiens
tttttgttgcwtcttgattta

SEQ ID NO: 7924 - DNA, 21 bp, Homo sapiens
tctttgggcakttctctggat

SEQ ID NO: 7925 - DNA, 21 bp, Homo sapiens
taatttattcytttttactga

SEQ ID NO: 7926 - DNA, 21 bp, Homo sapiens
tgtaatttttwaactattctc

SEQ ID NO: 7927 - DNA, 21 bp, Homo sapiens
tcagagactaktttgtactca

SEQ ID NO: 7928 - DNA, 21 bp, Homo sapiens
tagtgccctaracctctgggc

SEQ ID NO: 7929 - DNA, 21 bp, Homo sapiens
agagatggggwcttgctatgc

SEQ ID NO: 7930 - DNA, 21 bp, Homo sapiens
tattggccagrtaacgcatgt

SEQ ID NO: 7931 - DNA, 21 bp, Homo sapiens
gttaaaagtcrtataataatg

SEQ ID NO: 7932 - DNA, 21 bp, Homo sapiens
tctagccagcmggaacgaggt

SEQ ID NO: 7933 - DNA, 21 bp, Homo sapiens
cctatccagcrcttacctagt

SEQ ID NO: 7934 - DNA, 21 bp, Homo sapiens
cactgtattcrtcaccttggc

SEQ ID NO: 7935 - DNA, 21 bp, Homo sapiens
ttagcagcttkggggtaaagg

SEQ ID NO: 7936 - DNA, 21 bp, Homo sapiens
atatagagaaktacggtaaat

SEQ ID NO: 7937 - DNA, 21 bp, Homo sapiens
tgcgccagagsagggaggctg

SEQ ID NO: 7938 - DNA, 21 bp, Homo sapiens
tgtgtatttgwattagagccg

SEQ ID NO: 7939 - DNA, 21 bp, Homo sapiens
atgtgtgtggyctgaccgcct

SEQ ID NO: 7940 - DNA, 21 bp, Homo sapiens
ctttgtatctyctggccttgg

SEQ ID NO: 7941 - DNA, 21 bp, Homo sapiens
aggacaggggyattcaggcta

SEQ ID NO: 7942 - DNA, 21 bp, Homo sapiens
tcagtcaccaytgatgaaccc

SEQ ID NO: 7943 - DNA, 21 bp, Homo sapiens
tctcaaaactkcatgaatatc

SEQ ID NO: 7944 - DNA, 21 bp, Homo sapiens
aacttgccaartaccacacag

SEQ ID NO: 7945 - DNA, 21 bp, Homo sapiens
cccagtgaccrtcacgcagct

SEQ ID NO: 7946 - DNA, 21 bp, Homo sapiens
tcaacttcagkgggaggctca

SEQ ID NO: 7947 - DNA, 21 bp, Homo sapiens
cctgggccacrtggcggggtt

SEQ ID NO: 7948 - DNA, 21 bp, Homo sapiens
gggcctgacaycactgggagt

SEQ ID NO: 7949 - DNA, 21 bp, Homo sapiens
ggggcctgcamctggagtatt

SEQ ID NO: 7950 - DNA, 21 bp, Homo sapiens
gatgggttacrtggtttgtcc

SEQ ID NO: 7951 - DNA, 21 bp, Homo sapiens
catacacctcktgccctgtgg

SEQ ID NO: 7952 - DNA, 21 bp, Homo sapiens
ccactggaggrtgtgcccctc

SEQ ID NO: 7953 - DNA, 21 bp, Homo sapiens
cacacaccccratctgccttt

SEQ ID NO: 7954 - DNA, 21 bp, Homo sapiens
cctggcaccaygctaggtgct

SEQ ID NO: 7955 - DNA, 21 bp, Homo sapiens
gtttctcaaastaatttacca

SEQ ID NO: 7956 - DNA, 21 bp, Homo sapiens
aatgctgcccytctctgcagt

SEQ ID NO: 7957 - DNA, 21 bp, Homo sapiens
tcaggtggacraggacaagta

SEQ ID NO: 7958 - DNA, 21 bp, Homo sapiens
tggactggagytcacctctcc

SEQ ID NO: 7959 - DNA, 21 bp, Homo sapiens
aaggaatcacrgtgacaggcc

SEQ ID NO: 7960 - DNA, 21 bp, Homo sapiens
ctggggggccyggctctgtcc

SEQ ID NO: 7961 - DNA, 21 bp, Homo sapiens
ggctgtcacargcccttctcc

SEQ ID NO: 7962 - DNA, 21 bp, Homo sapiens
tgggtttccaygtaacctttg

SEQ ID NO: 7963 - DNA, 21 bp, Homo sapiens
tgtttgtaaaktgtcgtcatg

SEQ ID NO: 7964 - DNA, 21 bp, Homo sapiens
gtaaattgtcrtcatgcaaaa

SEQ ID NO: 7965 - DNA, 21 bp, Homo sapiens
tcttcattccrtacctagcca

SEQ ID NO: 7966 - DNA, 21 bp, Homo sapiens
taaattgaacmgcattgatcc

SEQ ID NO: 7967 - DNA, 21 bp, Homo sapiens
ctctctcaccsgatgacagag

SEQ ID NO: 7968 - DNA, 21 bp, Homo sapiens
tctctacgagmtcctcaagta

SEQ ID NO: 7969 - DNA, 21 bp, Homo sapiens
cattctctgamctgtggcaca

SEQ ID NO: 7970 - DNA, 21 bp, Homo sapiens
gaaggccctcragttcagcaa

SEQ ID NO: 7971 - DNA, 21 bp, Homo sapiens
tgagtggacaratgaatggat

SEQ ID NO: 7972 - DNA, 21 bp, Homo sapiens
acatcctggcrttaaaacgtc

SEQ ID NO: 7973 - DNA, 21 bp, Homo sapiens
ccaaacactcygcacacatac

SEQ ID NO: 7974 - DNA, 21 bp, Homo sapiens
gtggggctccrggcgcatccc

SEQ ID NO: 7975 - DNA, 21 bp, Homo sapiens
gcttggatgcrtagagttatt

SEQ ID NO: 7976 - DNA, 21 bp, Homo sapiens
gaattcaggcrtgtttcaaaa

SEQ ID NO: 7977 - DNA, 21 bp, Homo sapiens
atctgaggagygagaccagga

SEQ ID NO: 7978 - DNA, 21 bp, Homo sapiens
gcccaggcctyggcttcctcg

SEQ ID NO: 7979 - DNA, 21 bp, Homo sapiens
agagcaacccygtttccattg

SEQ ID NO: 7980 - DNA, 21 bp, Homo sapiens
ctctgcaggargcccccaagt

SEQ ID NO: 7981 - DNA, 21 bp, Homo sapiens
tgccagtcttsctcctgttca

SEQ ID NO: 7982 - DNA, 21 bp, Homo sapiens
aaggttaaacrtagagttgcc

SEQ ID NO: 7983 - DNA, 21 bp, Homo sapiens
cgctcatcgcrgcacagttcg

SEQ ID NO: 7984 - DNA, 21 bp, Homo sapiens
cacgtactcawagcacctgga

SEQ ID NO: 7985 - DNA, 21 bp, Homo sapiens
ctgagggcccygagtcccttc

SEQ ID NO: 7986 - DNA, 21 bp, Homo sapiens
ggctgctgaaygttctgctct

SEQ ID NO: 7987 - DNA, 21 bp, Homo sapiens
ctcctgcaaasggcccagagt

SEQ ID NO: 7988 - DNA, 21 bp, Homo sapiens
gcaagtgatgsacaccgggtg

SEQ ID NO: 7989 - DNA, 21 bp, Homo sapiens
gtgcatctttycttccaggca

SEQ ID NO: 7990 - DNA, 21 bp, Homo sapiens
ctgaccagccrtcagcaccat

SEQ ID NO: 7991 - DNA, 21 bp, Homo sapiens
gctgttctgcrcctgacttag

SEQ ID NO: 7992 - DNA, 21 bp, Homo sapiens
caggctcgagkgctactaagg

SEQ ID NO: 7993 - DNA, 21 bp, Homo sapiens
gcagtcatgayattggctgct

SEQ ID NO: 7994 - DNA, 21 bp, Homo sapiens
acatgagcgtsctcacaggga

SEQ ID NO: 7995 - DNA, 21 bp, Homo sapiens
gtctccaggarggtttaagag

SEQ ID NO: 7996 - DNA, 21 bp, Homo sapiens
ctcccttcccwactctgcagc

SEQ ID NO: 7997 - DNA, 21 bp, Homo sapiens
tcagggctttkcaggtggaca

SEQ ID NO: 7998 - DNA, 21 bp, Homo sapiens
cagtctgtgtytgtgtctggg

SEQ ID NO: 7999 - DNA, 21 bp, Homo sapiens
ggggaccagascgcttacggt

SEQ ID NO: 8000 - DNA, 21 bp, Homo sapiens
tcaaagagagmaggggtacga

SEQ ID NO: 8001 - DNA, 21 bp, Homo sapiens
gtgagttaggrggttatccta

SEQ ID NO: 8002 - DNA, 21 bp, Homo sapiens
cgaggaagccmgggtgtttgt

SEQ ID NO: 8003 - DNA, 21 bp, Homo sapiens
gagccctggcyacggtggcct

SEQ ID NO: 8004 - DNA, 21 bp, Homo sapiens
gcgactcgggyatcgcccctg

SEQ ID NO: 8005 - DNA, 21 bp, Homo sapiens
gctgggagctyttccagagcc

SEQ ID NO: 8006 - DNA, 21 bp, Homo sapiens
agagcatgcgyacaactctgg

SEQ ID NO: 8007 - DNA, 21 bp, Homo sapiens
ttccagtctcratgtcagcag

SEQ ID NO: 8008 - DNA, 21 bp, Homo sapiens
atccctgtggytgagccttat

SEQ ID NO: 8009 - DNA, 21 bp, Homo sapiens
atgagcccgcrcttacaggac

SEQ ID NO: 8010 - DNA, 21 bp, Homo sapiens
gtcgtgagccrtgaactattt

SEQ ID NO: 8011 - DNA, 21 bp, Homo sapiens
ctcttcacgcygggaagtgcc

SEQ ID NO: 8012 - DNA, 21 bp, Homo sapiens
aaagttattayagcctataag

SEQ ID NO: 8013 - DNA, 21 bp, Homo sapiens
tttcacccctrtaactgcact

SEQ ID NO: 8014 - DNA, 21 bp, Homo sapiens
tgtgatatctsctaacataga

SEQ ID NO: 8015 - DNA, 21 bp, Homo sapiens
ccaagatgatytgtaggcctg

SEQ ID NO: 8016 - DNA, 21 bp, Homo sapiens
tctacaccccygatccccacc

SEQ ID NO: 8017 - DNA, 21 bp, Homo sapiens
ggcagttggcrcgcgagattc

SEQ ID NO: 8018 - DNA, 21 bp, Homo sapiens
accctctctcrgagctatgaa

SEQ ID NO: 8019 - DNA, 21 bp, Homo sapiens
gtcacacgcasggtgagggca

SEQ ID NO: 8020 - DNA, 21 bp, Homo sapiens
agaccaagagmgcctgcattg

SEQ ID NO: 8021 - DNA, 21 bp, Homo sapiens
ggctggagtcrgtgcttccca

SEQ ID NO: 8022 - DNA, 21 bp, Homo sapiens
atacctgcccrtgctgccctc

SEQ ID NO: 8023 - DNA, 21 bp, Homo sapiens
tgtgacattcyggacagggca

SEQ ID NO: 8024 - DNA, 21 bp, Homo sapiens
agactcagcaygaaatgacag

SEQ ID NO: 8025 - DNA, 21 bp, Homo sapiens
tcttagctccrtggagtatgt

SEQ ID NO: 8026 - DNA, 21 bp, Homo sapiens
ggcgcggtggmtgtgggcagc

SEQ ID NO: 8027 - DNA, 21 bp, Homo sapiens
tgtcactgtcsccacctgttt

SEQ ID NO: 8028 - DNA, 21 bp, Homo sapiens
gttttcttccrttttttggca

SEQ ID NO: 8029 - DNA, 21 bp, Homo sapiens
tttcaaagtcrtctttttcag

SEQ ID NO: 8030 - DNA, 21 bp, Homo sapiens
tactgagtgtyagcgagatcc

SEQ ID NO: 8031 - DNA, 21 bp, Homo sapiens
tatgctgggcrtgcccttgga

SEQ ID NO: 8032 - DNA, 21 bp, Homo sapiens
tgttgtctgtyctgatttttg

SEQ ID NO: 8033 - DNA, 21 bp, Homo sapiens
gggacaggcayagcaggaggt

SEQ ID NO: 8034 - DNA, 21 bp, Homo sapiens
gggtgtgtgtmcatctcaaag

SEQ ID NO: 8035 - DNA, 21 bp, Homo sapiens
cccagcctccytctgccctct

SEQ ID NO: 8036 - DNA, 21 bp, Homo sapiens
ctcacagccakattgtacttt

SEQ ID NO: 8037 - DNA, 21 bp, Homo sapiens
tggtggccttstcattttaga

SEQ ID NO: 8038 - DNA, 21 bp, Homo sapiens
accacatcctrtccctcaggc

SEQ ID NO: 8039 - DNA, 21 bp, Homo sapiens
aaaccgtccakagggtgtggt

SEQ ID NO: 8040 - DNA, 21 bp, Homo sapiens
gaggcctgtgstacctgccac

SEQ ID NO: 8041 - DNA, 21 bp, Homo sapiens
tctgcagagamcaccaggatt

SEQ ID NO: 8042 - DNA, 21 bp, Homo sapiens
agcagcctgcyggctgacgca

SEQ ID NO: 8043 - DNA, 21 bp, Homo sapiens
cttcttcatcrtcagcaacct

SEQ ID NO: 8044 - DNA, 21 bp, Homo sapiens
ccatgaggccyttccccagtg

SEQ ID NO: 8045 - DNA, 21 bp, Homo sapiens
ccccttcaccstatggagctg

SEQ ID NO: 8046 - DNA, 21 bp, Homo sapiens
tgacccggtaycccgctcccc

SEQ ID NO: 8047 - DNA, 21 bp, Homo sapiens
gatcctataasttctgtcact

SEQ ID NO: 8048 - DNA, 21 bp, Homo sapiens
atgagacgacmggaaatatga

SEQ ID NO: 8049 - DNA, 21 bp, Homo sapiens
acaggagattmacagatgggg

SEQ ID NO: 8050 - DNA, 21 bp, Homo sapiens
agctctgcctsccagcccaca

SEQ ID NO: 8051 - DNA, 21 bp, Homo sapiens
aaaggcaacgwggtgccacca

SEQ ID NO: 8052 - DNA, 21 bp, Homo sapiens
gaattccctcytgaaagccag

SEQ ID NO: 8053 - DNA, 21 bp, Homo sapiens
tcaaaatgccmaactacgtgg

SEQ ID NO: 8054 - DNA, 21 bp, Homo sapiens
tggtggcggcratggcaatga

SEQ ID NO: 8055 - DNA, 21 bp, Homo sapiens
atcacacatgstctcatcccc

SEQ ID NO: 8056 - DNA, 21 bp, Homo sapiens
ggtgaccgggygctgggctat

SEQ ID NO: 8057 - DNA, 21 bp, Homo sapiens
tgaggcaaagyatattatgga

SEQ ID NO: 8058 - DNA, 21 bp, Homo sapiens
atgaaagccaygcctggctag

SEQ ID NO: 8059 - DNA, 21 bp, Homo sapiens
ctaaaggcaayggtttgctgc

SEQ ID NO: 8060 - DNA, 21 bp, Homo sapiens
tccactaatargtggtgtcat

SEQ ID NO: 8061 - DNA, 21 bp, Homo sapiens
aggctttctgycacttggagg

SEQ ID NO: 8062 - DNA, 21 bp, Homo sapiens
tccacacagaygggagcctgg

SEQ ID NO: 8063 - DNA, 21 bp, Homo sapiens
gtttgcactargtgtgcaaag

SEQ ID NO: 8064 - DNA, 21 bp, Homo sapiens
ccccaatgtgyggcaaattaa

SEQ ID NO: 8065 - DNA, 21 bp, Homo sapiens
tagtacatggwtgtcatcact

SEQ ID NO: 8066 - DNA, 21 bp, Homo sapiens
tctgctgcacrcccatgccag

SEQ ID NO: 8067 - DNA, 21 bp, Homo sapiens
ccaggtgtgaktggtaaggct

SEQ ID NO: 8068 - DNA, 21 bp, Homo sapiens
tttctccagcrtccacctggc

SEQ ID NO: 8069 - DNA, 21 bp, Homo sapiens
cctgcagaagragaaaaatca

SEQ ID NO: 8070 - DNA, 21 bp, Homo sapiens
tctccactgcrgtgggttgaa

SEQ ID NO: 8071 - DNA, 21 bp, Homo sapiens
gcccgggtgcrtgattgcgaa

SEQ ID NO: 8072 - DNA, 21 bp, Homo sapiens
gctgcagccascggcatgaga

SEQ ID NO: 8073 - DNA, 21 bp, Homo sapiens
gcatcactggytggttctggc

SEQ ID NO: 8074 - DNA, 21 bp, Homo sapiens
agctgggatgkgcacccaggc

SEQ ID NO: 8075 - DNA, 21 bp, Homo sapiens
ggtcaaggaasgcctctttaa

SEQ ID NO: 8076 - DNA, 21 bp, Homo sapiens
ggcccgccagrgcccaaagcc

SEQ ID NO: 8077 - DNA, 21 bp, Homo sapiens
ttttgatgaaytaataatcat

SEQ ID NO: 8078 - DNA, 21 bp, Homo sapiens
tgcaccatccrcagtgccaca

SEQ ID NO: 8079 - DNA, 21 bp, Homo sapiens
ccacctggccygcagctctct

SEQ ID NO: 8080 - DNA, 21 bp, Homo sapiens
aaccaaacccrccacccaacg

SEQ ID NO: 8081 - DNA, 21 bp, Homo sapiens
atctctctagygctcagtcca

SEQ ID NO: 8082 - DNA, 21 bp, Homo sapiens
cctgcttcccsctcaccggag

SEQ ID NO: 8083 - DNA, 21 bp, Homo sapiens
ccggatggaasagaagatcca

SEQ ID NO: 8084 - DNA, 21 bp, Homo sapiens
ccccgcaaggycgcggtgaca

SEQ ID NO: 8085 - DNA, 21 bp, Homo sapiens
caaccaatccratctctttct

SEQ ID NO: 8086 - DNA, 21 bp, Homo sapiens
gctccaccaamaagttttact

SEQ ID NO: 8087 - DNA, 21 bp, Homo sapiens
gcacatgtcaytgaacttaaa

SEQ ID NO: 8088 - DNA, 21 bp, Homo sapiens
cacagcctgargacaagtccc

SEQ ID NO: 8089 - DNA, 21 bp, Homo sapiens
ttatcattccytacttagaga

SEQ ID NO: 8090 - DNA, 21 bp, Homo sapiens
acttgctcccytcgtccatca

SEQ ID NO: 8091 - DNA, 21 bp, Homo sapiens
tggacatcagyactgagtgag

SEQ ID NO: 8092 - DNA, 21 bp, Homo sapiens
gaggcctgagsattttattct

SEQ ID NO: 8093 - DNA, 21 bp, Homo sapiens
tccgtgtctcrgtctctggag

SEQ ID NO: 8094 - DNA, 21 bp, Homo sapiens
atgccaagggygcagacccgc

SEQ ID NO: 8095 - DNA, 21 bp, Homo sapiens
tcaccggggarctcacacagg

SEQ ID NO: 8096 - DNA, 21 bp, Homo sapiens
acgaggaaagyacagtctttc

SEQ ID NO: 8097 - DNA, 21 bp, Homo sapiens
aaacgttttgygggtgaaggc

SEQ ID NO: 8098 - DNA, 21 bp, Homo sapiens
ccacacacgtyggtcaagtgg

SEQ ID NO: 8099 - DNA, 21 bp, Homo sapiens
aggctctgcaygtctcccggc

SEQ ID NO: 8100 - DNA, 21 bp, Homo sapiens
tagcacgcttstcactctaaa

SEQ ID NO: 8101 - DNA, 21 bp, Homo sapiens
ttattaagtgytcatgttgag

SEQ ID NO: 8102 - DNA, 21 bp, Homo sapiens
acaaagtaaarccatcattta

SEQ ID NO: 8103 - DNA, 21 bp, Homo sapiens
gtagagtttamagtgaggagc

SEQ ID NO: 8104 - DNA, 21 bp, Homo sapiens
catgtagatgycagctgtgtg

SEQ ID NO: 8105 - DNA, 21 bp, Homo sapiens
atgtacgaaargaaccagttc

SEQ ID NO: 8106 - DNA, 21 bp, Homo sapiens
accaccggccrtttcaatcca

SEQ ID NO: 8107 - DNA, 21 bp, Homo sapiens
tcaccctgggyctttctattt

SEQ ID NO: 8108 - DNA, 21 bp, Homo sapiens
tgctgggctcyctgtgtgtgc

SEQ ID NO: 8109 - DNA, 21 bp, Homo sapiens
gtactaagtgycatgcctggt

SEQ ID NO: 8110 - DNA, 21 bp, Homo sapiens
gtgcttcctamttctgggatt

SEQ ID NO: 8111 - DNA, 21 bp, Homo sapiens
acatgcaccamcccaatccag

SEQ ID NO: 8112 - DNA, 21 bp, Homo sapiens
tgttttgagartgtgttaggg

SEQ ID NO: 8113 - DNA, 21 bp, Homo sapiens
ctcacctgctrtgtgtcctgg

SEQ ID NO: 8114 - DNA, 21 bp, Homo sapiens
tgtggtccttrtatttcagac

SEQ ID NO: 8115 - DNA, 21 bp, Homo sapiens
caactctgcamctctgccatt

SEQ ID NO: 8116 - DNA, 21 bp, Homo sapiens
ggagagtgcaygcctcctcgg

SEQ ID NO: 8117 - DNA, 21 bp, Homo sapiens
agggatgaaasaagtgttgta

SEQ ID NO: 8118 - DNA, 21 bp, Homo sapiens
ggttcaactayacatgcagtc

SEQ ID NO: 8119 - DNA, 21 bp, Homo sapiens
gagctgtcacrttcttttcat

SEQ ID NO: 8120 - DNA, 21 bp, Homo sapiens
gtacagttgayattttcatct

SEQ ID NO: 8121 - DNA, 21 bp, Homo sapiens
ttggttcacasatgggctttg

SEQ ID NO: 8122 - DNA, 21 bp, Homo sapiens
tatccaggtgktccctgacac

SEQ ID NO: 8123 - DNA, 21 bp, Homo sapiens
gaacagagagrtcttcctaaa

SEQ ID NO: 8124 - DNA, 21 bp, Homo sapiens
tgttggatgcrtgcgcagatg

SEQ ID NO: 8125 - DNA, 21 bp, Homo sapiens
ccaccaagccktgactgtggt

SEQ ID NO: 8126 - DNA, 21 bp, Homo sapiens
ccatgtgttcrccttcacatc

SEQ ID NO: 8127 - DNA, 21 bp, Homo sapiens
ctaatgcaagygacccaagag

SEQ ID NO: 8128 - DNA, 21 bp, Homo sapiens
gctctcactcwcaccaaggag

SEQ ID NO: 8129 - DNA, 21 bp, Homo sapiens
caggatttaaraactgtttga

SEQ ID NO: 8130 - DNA, 21 bp, Homo sapiens
gtctctaagtrcccattccga

SEQ ID NO: 8131 - DNA, 21 bp, Homo sapiens
ctccatcggckgacacttcag

SEQ ID NO: 8132 - DNA, 21 bp, Homo sapiens
cttctcggcasggcccacagc

SEQ ID NO: 8133 - DNA, 21 bp, Homo sapiens
ggctttcagcygctgccccaa

SEQ ID NO: 8134 - DNA, 21 bp, Homo sapiens
tgcacgctggrgaggggagcc

SEQ ID NO: 8135 - DNA, 21 bp, Homo sapiens
ccacagccttkcatctctgac

SEQ ID NO: 8136 - DNA, 21 bp, Homo sapiens
tttaaagcatyagaaacattg

SEQ ID NO: 8137 - DNA, 21 bp, Homo sapiens
aaaggcctggrttcctgtcct

SEQ ID NO: 8138 - DNA, 21 bp, Homo sapiens
gaattcaatgkcaggaatcca

SEQ ID NO: 8139 - DNA, 21 bp, Homo sapiens
aaataggataygcacacagta

SEQ ID NO: 8140 - DNA, 21 bp, Homo sapiens
attaatcagaktaacaaactg

SEQ ID NO: 8141 - DNA, 21 bp, Homo sapiens
aaattcttcakccaaaagcag

SEQ ID NO: 8142 - DNA, 21 bp, Homo sapiens
tgaattacaayaaatattttt

SEQ ID NO: 8143 - DNA, 21 bp, Homo sapiens
ctcgcctgccrcacgtacccc

SEQ ID NO: 8144 - DNA, 21 bp, Homo sapiens
ttcccaagcayccttcacttc

SEQ ID NO: 8145 - DNA, 21 bp, Homo sapiens
taacaatgccrtgtgttcaat

SEQ ID NO: 8146 - DNA, 21 bp, Homo sapiens
accattaaatytccccgagat

SEQ ID NO: 8147 - DNA, 21 bp, Homo sapiens
tgggagcattmagtacatgtg

SEQ ID NO: 8148 - DNA, 21 bp, Homo sapiens
tgcaagggccrgaaggatgtg

SEQ ID NO: 8149 - DNA, 21 bp, Homo sapiens
tcattgttgtrtaatattcta

SEQ ID NO: 8150 - DNA, 21 bp, Homo sapiens
aggctatttckcactcctgct

SEQ ID NO: 8151 - DNA, 21 bp, Homo sapiens
cacagagatayggctgaagtt

SEQ ID NO: 8152 - DNA, 21 bp, Homo sapiens
ctcctcttctrgaagttttat

SEQ ID NO: 8153 - DNA, 21 bp, Homo sapiens
attccattctrtctactttct

SEQ ID NO: 8154 - DNA, 21 bp, Homo sapiens
gcctgtgaaayccagccactt

SEQ ID NO: 8155 - DNA, 21 bp, Homo sapiens
tcctgaacgcrgggcaccacc

SEQ ID NO: 8156 - DNA, 21 bp, Homo sapiens
tgcaagcctcrgcccctcact

SEQ ID NO: 8157 - DNA, 21 bp, Homo sapiens
aggggctacgyggcctccaca

SEQ ID NO: 8158 - DNA, 21 bp, Homo sapiens
ggaaatggcakagtacagaga

SEQ ID NO: 8159 - DNA, 21 bp, Homo sapiens
ctgagcccagygagctcccgg

SEQ ID NO: 8160 - DNA, 21 bp, Homo sapiens
tatataaaaayttgtaatatt

SEQ ID NO: 8161 - DNA, 21 bp, Homo sapiens
ggcagggagcrggaagcctct

SEQ ID NO: 8162 - DNA, 21 bp, Homo sapiens
ctcacatgacmttctaaaata

SEQ ID NO: 8163 - DNA, 21 bp, Homo sapiens
gagctgttccytcttggtgtt

SEQ ID NO: 8164 - DNA, 21 bp, Homo sapiens
aatccttagamgacaaatcaa

SEQ ID NO: 8165 - DNA, 21 bp, Homo sapiens
tgctgttttcytttcaaggag

SEQ ID NO: 8166 - DNA, 21 bp, Homo sapiens
caacaagtacyggatggtgag

SEQ ID NO: 8167 - DNA, 21 bp, Homo sapiens
agaaattaccytgcggctctt

SEQ ID NO: 8168 - DNA, 21 bp, Homo sapiens
gagggaggcayggagtggaca

SEQ ID NO: 8169 - DNA, 21 bp, Homo sapiens
cgtaggaggcrcttacacagg

SEQ ID NO: 8170 - DNA, 21 bp, Homo sapiens
cactggaacgygaatgttccc

SEQ ID NO: 8171 - DNA, 21 bp, Homo sapiens
cttttttatgmaggttaggct

SEQ ID NO: 8172 - DNA, 21 bp, Homo sapiens
agctataatgwtataaaaaga

SEQ ID NO: 8173 - DNA, 21 bp, Homo sapiens
aaccaatgtawtttcagtcct

SEQ ID NO: 8174 - DNA, 21 bp, Homo sapiens
ctctatcccastgattaccac

SEQ ID NO: 8175 - DNA, 21 bp, Homo sapiens
ccatcaactayagttgataac

SEQ ID NO: 8176 - DNA, 21 bp, Homo sapiens
acttcatttcyctttaataga

SEQ ID NO: 8177 - DNA, 21 bp, Homo sapiens
attaagtggcraaagagtaaa

SEQ ID NO: 8178 - DNA, 21 bp, Homo sapiens
cagccattttmaatatgcatt

SEQ ID NO: 8179 - DNA, 21 bp, Homo sapiens
agctctttacrcaaaacatgg

SEQ ID NO: 8180 - DNA, 21 bp, Homo sapiens
ccaaagccatrtggcacagcc

SEQ ID NO: 8181 - DNA, 21 bp, Homo sapiens
actattgttaygatccactcc

SEQ ID NO: 8182 - DNA, 21 bp, Homo sapiens
ctggatgtggrtggacaagag

SEQ ID NO: 8183 - DNA, 21 bp, Homo sapiens
gacagggtgaytcattggaga

SEQ ID NO: 8184 - DNA, 21 bp, Homo sapiens
agaaaactacrcctaggcaca

SEQ ID NO: 8185 - DNA, 21 bp, Homo sapiens
gattaatttayaagaaattta

SEQ ID NO: 8186 - DNA, 21 bp, Homo sapiens
agcatccttcycttcaatcag

SEQ ID NO: 8187 - DNA, 21 bp, Homo sapiens
ataggttcaawaggttcaaac

SEQ ID NO: 8188 - DNA, 21 bp, Homo sapiens
gcctgttaggyctcttaaatt

SEQ ID NO: 8189 - DNA, 21 bp, Homo sapiens
ttaagaacacrgcaaataggg

SEQ ID NO: 8190 - DNA, 21 bp, Homo sapiens
gaagtgggctscagacaaatg

SEQ ID NO: 8191 - DNA, 21 bp, Homo sapiens
catcctcaatraatcagtcta

SEQ ID NO: 8192 - DNA, 21 bp, Homo sapiens
ataggtaataygggtcttgtg

SEQ ID NO: 8193 - DNA, 21 bp, Homo sapiens
atccagtatakgaggctgata

SEQ ID NO: 8194 - DNA, 21 bp, Homo sapiens
ctcttcatgaygtatttttct

SEQ ID NO: 8195 - DNA, 21 bp, Homo sapiens
tattctctctyggtattttca

SEQ ID NO: 8196 - DNA, 21 bp, Homo sapiens
ggctccctcakgtagggactc

SEQ ID NO: 8197 - DNA, 21 bp, Homo sapiens
agtaaattggrtaatgcctgc

SEQ ID NO: 8198 - DNA, 21 bp, Homo sapiens
cagcaaaaacscacctttaaa

SEQ ID NO: 8199 - DNA, 21 bp, Homo sapiens
attaactactwaaaaaaccac

SEQ ID NO: 8200 - DNA, 21 bp, Homo sapiens
actctagagcmgagtttcagt

SEQ ID NO: 8201 - DNA, 21 bp, Homo sapiens
aaagtaaagcwtagaagggtc

SEQ ID NO: 8202 - DNA, 21 bp, Homo sapiens
tgttagcacaygataaccaca

SEQ ID NO: 8203 - DNA, 21 bp, Homo sapiens
ttttttaaatmagatctcaaa

SEQ ID NO: 8204 - DNA, 21 bp, Homo sapiens
acactggccastgtgacacta

SEQ ID NO: 8205 - DNA, 21 bp, Homo sapiens
tcttttttatyacctgttatt

SEQ ID NO: 8206 - DNA, 21 bp, Homo sapiens
gattactttaytcacctgtga

SEQ ID NO: 8207 - DNA, 21 bp, Homo sapiens
aatgattaacrgttccagtgg

SEQ ID NO: 8208 - DNA, 21 bp, Homo sapiens
ttgattccatktattttctgc

SEQ ID NO: 8209 - DNA, 21 bp, Homo sapiens
ataacccagaytggcaaataa

SEQ ID NO: 8210 - DNA, 21 bp, Homo sapiens
tgaaaaacaayaacaaaaacc

SEQ ID NO: 8211 - DNA, 21 bp, Homo sapiens
ttactactcawcgaatatgat

SEQ ID NO: 8212 - DNA, 21 bp, Homo sapiens
ttaacatggcmcttaaaaaat

SEQ ID NO: 8213 - DNA, 21 bp, Homo sapiens
gaatattgccwacacttctat

SEQ ID NO: 8214 - DNA, 21 bp, Homo sapiens
catagatggaygcacattgta

SEQ ID NO: 8215 - DNA, 21 bp, Homo sapiens
tgctgacatgrtggtgaagag

SEQ ID NO: 8216 - DNA, 21 bp, Homo sapiens
tccactctcaytgtggtccat

SEQ ID NO: 8217 - DNA, 21 bp, Homo sapiens
gcaagctcccrcagtctcaga

SEQ ID NO: 8218 - DNA, 21 bp, Homo sapiens
tgcccaggacrgatgagtaaa

SEQ ID NO: 8219 - DNA, 21 bp, Homo sapiens
tggggtctttrggaggtgatt

SEQ ID NO: 8220 - DNA, 21 bp, Homo sapiens
caaccctaccragccattcag

SEQ ID NO: 8221 - DNA, 21 bp, Homo sapiens
ttaatacactsaagaaacaaa

SEQ ID NO: 8222 - DNA, 21 bp, Homo sapiens
tggaaactccrttaaagctgg

SEQ ID NO: 8223 - DNA, 21 bp, Homo sapiens
ataaattatgratgctttatg

SEQ ID NO: 8224 - DNA, 21 bp, Homo sapiens
aaatacaatgrccaatagaag

SEQ ID NO: 8225 - DNA, 21 bp, Homo sapiens
taatgactatyttattcttaa

SEQ ID NO: 8226 - DNA, 21 bp, Homo sapiens
tttctaagaaytatcaagtac

SEQ ID NO: 8227 - DNA, 21 bp, Homo sapiens
catgtctctcyagttgtctag

SEQ ID NO: 8228 - DNA, 21 bp, Homo sapiens
agaatgtatayacacacaatt

SEQ ID NO: 8229 - DNA, 21 bp, Homo sapiens
aaattggcagkagccagacaa

SEQ ID NO: 8230 - DNA, 21 bp, Homo sapiens
atggacatacrattattagaa

SEQ ID NO: 8231 - DNA, 21 bp, Homo sapiens
tttagctttamttattggata

SEQ ID NO: 8232 - DNA, 21 bp, Homo sapiens
gcaatttctcygaactttcta

SEQ ID NO: 8233 - DNA, 21 bp, Homo sapiens
aacatcaaccmgagaactaac

SEQ ID NO: 8234 - DNA, 21 bp, Homo sapiens
gtattctcttygatcctcctt

SEQ ID NO: 8235 - DNA, 21 bp, Homo sapiens
aaatgaatgayttctcatact

SEQ ID NO: 8236 - DNA, 21 bp, Homo sapiens
agctctgtacwcatttccaga

SEQ ID NO: 8237 - DNA, 21 bp, Homo sapiens
catatctctaytcagtttttt

SEQ ID NO: 8238 - DNA, 21 bp, Homo sapiens
ttttgctgagytttgttctga

SEQ ID NO: 8239 - DNA, 21 bp, Homo sapiens
aatgaattgayggtctggcaa

SEQ ID NO: 8240 - DNA, 21 bp, Homo sapiens
gattaccataygctaacaaaa

SEQ ID NO: 8241 - DNA, 21 bp, Homo sapiens
ctgaatataayagactagagg

SEQ ID NO: 8242 - DNA, 21 bp, Homo sapiens
gcaaatgcttyttttctccat

SEQ ID NO: 8243 - DNA, 21 bp, Homo sapiens
ccattttgagytccttgtacc

SEQ ID NO: 8244 - DNA, 21 bp, Homo sapiens
tttaattcagrccctccagaa

SEQ ID NO: 8245 - DNA, 21 bp, Homo sapiens
tcctctctggwcacactaaac

SEQ ID NO: 8246 - DNA, 21 bp, Homo sapiens
gactttccaasgttaaattct

SEQ ID NO: 8247 - DNA, 21 bp, Homo sapiens
agtagaaggcwatattcttta

SEQ ID NO: 8248 - DNA, 21 bp, Homo sapiens
agatcctcaamttttccatac

SEQ ID NO: 8249 - DNA, 21 bp, Homo sapiens
accctatgatsggtgctattc

SEQ ID NO: 8250 - DNA, 21 bp, Homo sapiens
aacctaaatakgtaaagaaat

SEQ ID NO: 8251 - DNA, 21 bp, Homo sapiens
tccggaaatgmatataaaatt

SEQ ID NO: 8252 - DNA, 21 bp, Homo sapiens
ggatctgggcrgcaggacacc

SEQ ID NO: 8253 - DNA, 21 bp, Homo sapiens
agaaatttagraaaaggaatt

SEQ ID NO: 8254 - DNA, 21 bp, Homo sapiens
agatttgttamaattggaagc

SEQ ID NO: 8255 - DNA, 21 bp, Homo sapiens
gttgcttttgyagtgttcttc

SEQ ID NO: 8256 - DNA, 21 bp, Homo sapiens
actgataaaayaaattagaga

SEQ ID NO: 8257 - DNA, 21 bp, Homo sapiens
aggatggactrggcaggggca

SEQ ID NO: 8258 - DNA, 21 bp, Homo sapiens
tttttacttcrcagtacttac

SEQ ID NO: 8259 - DNA, 21 bp, Homo sapiens
ggagtgtcacrgatgactcct

SEQ ID NO: 8260 - DNA, 21 bp, Homo sapiens
ctttaatgctytgaaaagtct

SEQ ID NO: 8261 - DNA, 21 bp, Homo sapiens
cataacatacyacaggtttgt

SEQ ID NO: 8262 - DNA, 21 bp, Homo sapiens
gctgcctgtcratgtccaggt

SEQ ID NO: 8263 - DNA, 21 bp, Homo sapiens
ggatggttcayacccaaagtc

SEQ ID NO: 8264 - DNA, 21 bp, Homo sapiens
ttcaaacatcrtaatttctgg

SEQ ID NO: 8265 - DNA, 21 bp, Homo sapiens
tgttttttccrtttagcacct

SEQ ID NO: 8266 - DNA, 21 bp, Homo sapiens
ccagacagtcraagagtagga

SEQ ID NO: 8267 - DNA, 21 bp, Homo sapiens
tagattgcttygattttttct

SEQ ID NO: 8268 - DNA, 21 bp, Homo sapiens
acgtgcagttktgaaaacaga

SEQ ID NO: 8269 - DNA, 21 bp, Homo sapiens
ttcttttctgyatctcctcct

SEQ ID NO: 8270 - DNA, 21 bp, Homo sapiens
aaattttctamcatcagaaaa

SEQ ID NO: 8271 - DNA, 21 bp, Homo sapiens
cacaacctccwttctcccaga

SEQ ID NO: 8272 - DNA, 21 bp, Homo sapiens
aagtatcttcractaaaattt

SEQ ID NO: 8273 - DNA, 21 bp, Homo sapiens
tgagtctgccrctttctgatg

SEQ ID NO: 8274 - DNA, 21 bp, Homo sapiens
aattcaaggtygataggattc

SEQ ID NO: 8275 - DNA, 21 bp, Homo sapiens
taacctgcacrtcgtgctttg

SEQ ID NO: 8276 - DNA, 21 bp, Homo sapiens
agcctgaaccrgatatgccat

SEQ ID NO: 8277 - DNA, 21 bp, Homo sapiens
cacatctaatygctgtctagg

SEQ ID NO: 8278 - DNA, 21 bp, Homo sapiens
tcacaatttcrtcatgtcaag

SEQ ID NO: 8279 - DNA, 21 bp, Homo sapiens
acagataatgraatacctttt

SEQ ID NO: 8280 - DNA, 21 bp, Homo sapiens
atgtgaaactkatttactcga

SEQ ID NO: 8281 - DNA, 21 bp, Homo sapiens
aaagtagacaycactggctaa

SEQ ID NO: 8282 - DNA, 21 bp, Homo sapiens
cctgttccctsacatcactca

SEQ ID NO: 8283 - DNA, 21 bp, Homo sapiens
tagcaacagcrccactagcca

SEQ ID NO: 8284 - DNA, 21 bp, Homo sapiens
gacaataggarcaagcacact

SEQ ID NO: 8285 - DNA, 21 bp, Homo sapiens
tttttttatamatttttacct

SEQ ID NO: 8286 - DNA, 21 bp, Homo sapiens
ctcctgaactstgatagagaa

SEQ ID NO: 8287 - DNA, 21 bp, Homo sapiens
cagtgaactasaaatttgttt

SEQ ID NO: 8288 - DNA, 21 bp, Homo sapiens
tgatagttcastgctagagac

SEQ ID NO: 8289 - DNA, 21 bp, Homo sapiens
ccctccttgcrttgtttgagt

SEQ ID NO: 8290 - DNA, 21 bp, Homo sapiens
ttgtcaaatayccttaattca

SEQ ID NO: 8291 - DNA, 21 bp, Homo sapiens
tggctttttamtttctacctt

SEQ ID NO: 8292 - DNA, 21 bp, Homo sapiens
cctaatacaayctaatacaac

SEQ ID NO: 8293 - DNA, 21 bp, Homo sapiens
ttccacacaaygcagcacaag

SEQ ID NO: 8294 - DNA, 21 bp, Homo sapiens
ttacccgcgaytggtgtctgt

SEQ ID NO: 8295 - DNA, 21 bp, Homo sapiens
attctttatcygtttgtgtta

SEQ ID NO: 8296 - DNA, 21 bp, Homo sapiens
gcaagatgtgstactaaatgg

SEQ ID NO: 8297 - DNA, 21 bp, Homo sapiens
tcccagctaamcttgtttctg

SEQ ID NO: 8298 - DNA, 21 bp, Homo sapiens
aacttgcctcwggttattagg

SEQ ID NO: 8299 - DNA, 21 bp, Homo sapiens
tgaaattaackatttaaatac

SEQ ID NO: 8300 - DNA, 21 bp, Homo sapiens
tagtttaagtyacccaagttg

SEQ ID NO: 8301 - DNA, 21 bp, Homo sapiens
ttcctcttacyggaatgttct

SEQ ID NO: 8302 - DNA, 21 bp, Homo sapiens
gggatcgattscaggctcaga

SEQ ID NO: 8303 - DNA, 21 bp, Homo sapiens
tagagttccaygcatctgaga

SEQ ID NO: 8304 - DNA, 21 bp, Homo sapiens
tgaaattcaamtagcatctta

SEQ ID NO: 8305 - DNA, 21 bp, Homo sapiens
attgatattcrggggaagtag

SEQ ID NO: 8306 - DNA, 21 bp, Homo sapiens
ttctaggtctyttgttcaaat

SEQ ID NO: 8307 - DNA, 21 bp, Homo sapiens
ccatgctctcrgcacaagtaa

SEQ ID NO: 8308 - DNA, 21 bp, Homo sapiens
taaatatatarcaaaaaaatc

SEQ ID NO: 8309 - DNA, 21 bp, Homo sapiens
tgtctgtctayttaacgggcg

SEQ ID NO: 8310 - DNA, 21 bp, Homo sapiens
cttggcccttrtaatacctga

SEQ ID NO: 8311 - DNA, 21 bp, Homo sapiens
gatccctcccytaccccattt

SEQ ID NO: 8312 - DNA, 21 bp, Homo sapiens
tattgtatttmtaaatgcttg

SEQ ID NO: 8313 - DNA, 21 bp, Homo sapiens
tgaccattackcaaaagaggc

SEQ ID NO: 8314 - DNA, 21 bp, Homo sapiens
acgtcatttcrtaccttcatg

SEQ ID NO: 8315 - DNA, 21 bp, Homo sapiens
atgtggacagraggaggaaaa

SEQ ID NO: 8316 - DNA, 21 bp, Homo sapiens
agtactttacygttcattgaa

SEQ ID NO: 8317 - DNA, 21 bp, Homo sapiens
aacacagaccratgacttgtg

SEQ ID NO: 8318 - DNA, 21 bp, Homo sapiens
ggttaaaaagrggaagcaaca

SEQ ID NO: 8319 - DNA, 21 bp, Homo sapiens
tatctctaaamaccttattga

SEQ ID NO: 8320 - DNA, 21 bp, Homo sapiens
tattcttttcmagattaattc

SEQ ID NO: 8321 - DNA, 21 bp, Homo sapiens
tctccttcctsctgaaaaact

SEQ ID NO: 8322 - DNA, 21 bp, Homo sapiens
attagcccagraaatctggct

SEQ ID NO: 8323 - DNA, 21 bp, Homo sapiens
ttcatttctartaagtagagg

SEQ ID NO: 8324 - DNA, 21 bp, Homo sapiens
ggtaaccaacrgtcattcctg

SEQ ID NO: 8325 - DNA, 21 bp, Homo sapiens
aaaagaaaaawtatttttgat

SEQ ID NO: 8326 - DNA, 21 bp, Homo sapiens
agattttggawgactctcacc

SEQ ID NO: 8327 - DNA, 21 bp, Homo sapiens
gttacaaaacwaccctatggc

SEQ ID NO: 8328 - DNA, 21 bp, Homo sapiens
caaaaaaaacyttccttcagt

SEQ ID NO: 8329 - DNA, 21 bp, Homo sapiens
caaggaaaatrttccacatgc

SEQ ID NO: 8330 - DNA, 21 bp, Homo sapiens
taatttctacyatgattgtga

SEQ ID NO: 8331 - DNA, 21 bp, Homo sapiens
aatcttgtttyttctccattt

SEQ ID NO: 8332 - DNA, 21 bp, Homo sapiens
tcctttgtgakagcatagcag

SEQ ID NO: 8333 - DNA, 21 bp, Homo sapiens
aaactgctctscattgttatt

SEQ ID NO: 8334 - DNA, 21 bp, Homo sapiens
agtatctaagygcagtgaata

SEQ ID NO: 8335 - DNA, 21 bp, Homo sapiens
taagccatagyatagactttg

SEQ ID NO: 8336 - DNA, 21 bp, Homo sapiens
ctctttacctsatttaatgac

SEQ ID NO: 8337 - DNA, 21 bp, Homo sapiens
atttatcacaytgttagctct

SEQ ID NO: 8338 - DNA, 21 bp, Homo sapiens
ttacacttacyggctcttctc

SEQ ID NO: 8339 - DNA, 21 bp, Homo sapiens
ccacactttakaaaacactac

SEQ ID NO: 8340 - DNA, 21 bp, Homo sapiens
ctaattcttartctttatagg

SEQ ID NO: 8341 - DNA, 21 bp, Homo sapiens
attttaggttkagaatataag

SEQ ID NO: 8342 - DNA, 21 bp, Homo sapiens
ataactatgcmtagaattatg

SEQ ID NO: 8343 - DNA, 21 bp, Homo sapiens
gagctgagctmctcctgtcct

SEQ ID NO: 8344 - DNA, 21 bp, Homo sapiens
agttgaagtgygactcctagg

SEQ ID NO: 8345 - DNA, 21 bp, Homo sapiens
aatgaacagtragatgtatac

SEQ ID NO: 8346 - DNA, 21 bp, Homo sapiens
tatctatgcarttgtcttttt

SEQ ID NO: 8347 - DNA, 21 bp, Homo sapiens
aaagaggactsctcacttatt

SEQ ID NO: 8348 - DNA, 21 bp, Homo sapiens
tgtagatgtawgaattagtgg

SEQ ID NO: 8349 - DNA, 21 bp, Homo sapiens
tacttcagaamcccagagcat

SEQ ID NO: 8350 - DNA, 21 bp, Homo sapiens
gaatgaagcayatcaataggt

SEQ ID NO: 8351 - DNA, 21 bp, Homo sapiens
ttaattaatakctgacatatt

SEQ ID NO: 8352 - DNA, 21 bp, Homo sapiens
ttaagaactcyttctatattg

SEQ ID NO: 8353 - DNA, 21 bp, Homo sapiens
ataaagctacrgagaatcttc

SEQ ID NO: 8354 - DNA, 21 bp, Homo sapiens
ttaaatcagcmcctccattgt

SEQ ID NO: 8355 - DNA, 21 bp, Homo sapiens
tcacatcttcygggttacttg

SEQ ID NO: 8356 - DNA, 21 bp, Homo sapiens
atcacattgaygacaacagtt

SEQ ID NO: 8357 - DNA, 21 bp, Homo sapiens
ttaaaatctgraaaaaaaaat

SEQ ID NO: 8358 - DNA, 21 bp, Homo sapiens
aaaaaaaaaaraaagaaagaa

SEQ ID NO: 8359 - DNA, 21 bp, Homo sapiens
tgtgctacatrgaatctgagt

SEQ ID NO: 8360 - DNA, 21 bp, Homo sapiens
gagaaactctygtcctattaa

SEQ ID NO: 8361 - DNA, 21 bp, Homo sapiens
ttacaaatatkttcttctagt

SEQ ID NO: 8362 - DNA, 21 bp, Homo sapiens
tggtttgacayacaagttgct

SEQ ID NO: 8363 - DNA, 21 bp, Homo sapiens
tgtttgtgagscttctcccaa

SEQ ID NO: 8364 - DNA, 21 bp, Homo sapiens
taggatatgayacattctgtc

SEQ ID NO: 8365 - DNA, 21 bp, Homo sapiens
gcatttcagarctacaagttc

SEQ ID NO: 8366 - DNA, 21 bp, Homo sapiens
atcttgtctayctaaattcct

SEQ ID NO: 8367 - DNA, 21 bp, Homo sapiens
tcaaatgactwatgaagcaca

SEQ ID NO: 8368 - DNA, 21 bp, Homo sapiens
tcaatttgctrttaattcttc

SEQ ID NO: 8369 - DNA, 21 bp, Homo sapiens
ttggtgtttgraaaaaaaggt

SEQ ID NO: 8370 - DNA, 21 bp, Homo sapiens
agagcatcaartataaattca

SEQ ID NO: 8371 - DNA, 21 bp, Homo sapiens
ttttctggttrtactttccaa

SEQ ID NO: 8372 - DNA, 21 bp, Homo sapiens
aaaagtaatgygaaaaggtat

SEQ ID NO: 8373 - DNA, 21 bp, Homo sapiens
aaacatcgtawgaaaacatcc

SEQ ID NO: 8374 - DNA, 21 bp, Homo sapiens
ataactctttwaaaaagtgag

SEQ ID NO: 8375 - DNA, 21 bp, Homo sapiens
aattaactaakcaaaaatatt

SEQ ID NO: 8376 - DNA, 21 bp, Homo sapiens
tttatcccatygcctaaatac

SEQ ID NO: 8377 - DNA, 21 bp, Homo sapiens
ataatttactkttaccaacct

SEQ ID NO: 8378 - DNA, 21 bp, Homo sapiens
gttcatcttayagccttgttg

SEQ ID NO: 8379 - DNA, 21 bp, Homo sapiens
cactctgccayactctcctcc

SEQ ID NO: 8380 - DNA, 21 bp, Homo sapiens
tttgtgtttaygtttttgaca

SEQ ID NO: 8381 - DNA, 21 bp, Homo sapiens
tcggtattacmaaaagataac

SEQ ID NO: 8382 - DNA, 21 bp, Homo sapiens
ctctctccccsgtggcaagta

SEQ ID NO: 8383 - DNA, 21 bp, Homo sapiens
tcctccctgaygcacagccgg

SEQ ID NO: 8384 - DNA, 21 bp, Homo sapiens
atctctaaaawggtcttttaa

SEQ ID NO: 8385 - DNA, 21 bp, Homo sapiens
agaatgaccayctcattacca

SEQ ID NO: 8386 - DNA, 21 bp, Homo sapiens
tacagctgtgsctgacaaggt

SEQ ID NO: 8387 - DNA, 21 bp, Homo sapiens
atcaactagcragatgaatag

SEQ ID NO: 8388 - DNA, 21 bp, Homo sapiens
ttctccaacgyattcacaggc

SEQ ID NO: 8389 - DNA, 21 bp, Homo sapiens
acttaatgttwctgggatgtc

SEQ ID NO: 8390 - DNA, 21 bp, Homo sapiens
aaaaaaaaaamaacaaaaggt

SEQ ID NO: 8391 - DNA, 21 bp, Homo sapiens
ttttaaacatsgcctaagact

SEQ ID NO: 8392 - DNA, 21 bp, Homo sapiens
tgctttgtgtratgattagca

SEQ ID NO: 8393 - DNA, 21 bp, Homo sapiens
aatgtcctctratctttattc

SEQ ID NO: 8394 - DNA, 21 bp, Homo sapiens
tagagtgttgycttctaacta

SEQ ID NO: 8395 - DNA, 21 bp, Homo sapiens
tcaagcatcarcctttaggtg

SEQ ID NO: 8396 - DNA, 21 bp, Homo sapiens
gcctttaggtrctccatcatc

SEQ ID NO: 8397 - DNA, 21 bp, Homo sapiens
taacaacatamagacccaagg

SEQ ID NO: 8398 - DNA, 21 bp, Homo sapiens
tgagctgtcaytgggacgtaa

SEQ ID NO: 8399 - DNA, 21 bp, Homo sapiens
cctatgctggmaatcaaccta

SEQ ID NO: 8400 - DNA, 21 bp, Homo sapiens
gatatacaccragatcttcct

SEQ ID NO: 8401 - DNA, 21 bp, Homo sapiens
ctgggagagarggaagggaaa

SEQ ID NO: 8402 - DNA, 21 bp, Homo sapiens
ataacgtatgwcatgtgatag

SEQ ID NO: 8403 - DNA, 21 bp, Homo sapiens
gaaaggtaagygattctgaaa

SEQ ID NO: 8404 - DNA, 21 bp, Homo sapiens
acactgaaaamtcaggttgcc

SEQ ID NO: 8405 - DNA, 21 bp, Homo sapiens
gaggagccagratgatactca

SEQ ID NO: 8406 - DNA, 21 bp, Homo sapiens
aggaattgccscttccatcat

SEQ ID NO: 8407 - DNA, 21 bp, Homo sapiens
ctgttaatatygctgttttta

SEQ ID NO: 8408 - DNA, 21 bp, Homo sapiens
ctaaatgtctsccatttttaa

SEQ ID NO: 8409 - DNA, 21 bp, Homo sapiens
ccattgtgagyaaggtcctga

SEQ ID NO: 8410 - DNA, 21 bp, Homo sapiens
gcatttagatytaggctacaa

SEQ ID NO: 8411 - DNA, 21 bp, Homo sapiens
ctgtttaaatytcaccctgct

SEQ ID NO: 8412 - DNA, 21 bp, Homo sapiens
cctataaatgmagcaaagggc

SEQ ID NO: 8413 - DNA, 21 bp, Homo sapiens
gtaaggctctrtaagtgctgg

SEQ ID NO: 8414 - DNA, 21 bp, Homo sapiens
taagttgttaytaccttatac

SEQ ID NO: 8415 - DNA, 21 bp, Homo sapiens
cctttctgtaygtgcatgctg

SEQ ID NO: 8416 - DNA, 21 bp, Homo sapiens
gagtcagttgyaccctttcat

SEQ ID NO: 8417 - DNA, 21 bp, Homo sapiens
aatcaatctcwtgaagacgaa

SEQ ID NO: 8418 - DNA, 21 bp, Homo sapiens
aatcaaaaccrtatttcgtaa

SEQ ID NO: 8419 - DNA, 21 bp, Homo sapiens
ttacttttaawtatttatatt

SEQ ID NO: 8420 - DNA, 21 bp, Homo sapiens
tcacctgcctraaaacacaac

SEQ ID NO: 8421 - DNA, 21 bp, Homo sapiens
cacttacaatycagttattca

SEQ ID NO: 8422 - DNA, 21 bp, Homo sapiens
gaattataaaratgtttcaaa

SEQ ID NO: 8423 - DNA, 21 bp, Homo sapiens
aattttcgtgyagtgttgcaa

SEQ ID NO: 8424 - DNA, 21 bp, Homo sapiens
attcagagcaytttgcaggtt

SEQ ID NO: 8425 - DNA, 21 bp, Homo sapiens
tctcaaaaaawttttttttca

SEQ ID NO: 8426 - DNA, 21 bp, Homo sapiens
taatttcttaygcccaggagg

SEQ ID NO: 8427 - DNA, 21 bp, Homo sapiens
ctttctgtccmttgctgtttt

SEQ ID NO: 8428 - DNA, 21 bp, Homo sapiens
aacttatataraaaaggtgtc

SEQ ID NO: 8429 - DNA, 21 bp, Homo sapiens
actacaatacygcaatgctct

SEQ ID NO: 8430 - DNA, 21 bp, Homo sapiens
atttgccccaytctactctta

SEQ ID NO: 8431 - DNA, 21 bp, Homo sapiens
taggcaaaagrgatactaaga

SEQ ID NO: 8432 - DNA, 21 bp, Homo sapiens
gctgattctcygtggtcacaa

SEQ ID NO: 8433 - DNA, 21 bp, Homo sapiens
ttttaaaaatyagtcctataa

SEQ ID NO: 8434 - DNA, 21 bp, Homo sapiens
ctaaaaaggcygggagcctgg

SEQ ID NO: 8435 - DNA, 21 bp, Homo sapiens
ttttattgttygttagaaagg

SEQ ID NO: 8436 - DNA, 21 bp, Homo sapiens
tccccacttcrcagctaaaga

SEQ ID NO: 8437 - DNA, 21 bp, Homo sapiens
ttggagagctrtccgctgggg

SEQ ID NO: 8438 - DNA, 21 bp, Homo sapiens
aaaaaaaaagkaagtggaaca

SEQ ID NO: 8439 - DNA, 21 bp, Homo sapiens
ttctgcactgygaagccatca

SEQ ID NO: 8440 - DNA, 21 bp, Homo sapiens
tgtttgcatgkgtggttacaa

SEQ ID NO: 8441 - DNA, 21 bp, Homo sapiens
aagacaataayagcaaaacat

SEQ ID NO: 8442 - DNA, 21 bp, Homo sapiens
tcactgcatcygaccatctca

SEQ ID NO: 8443 - DNA, 21 bp, Homo sapiens
atctgcctccragctgccttc

SEQ ID NO: 8444 - DNA, 21 bp, Homo sapiens
ctagttttgasaatagcagcc

SEQ ID NO: 8445 - DNA, 21 bp, Homo sapiens
taaaaaataasagtaccttca

SEQ ID NO: 8446 - DNA, 21 bp, Homo sapiens
aatggggatcktggaaacagc

SEQ ID NO: 8447 - DNA, 21 bp, Homo sapiens
tgcatttaagygacaaagaac

SEQ ID NO: 8448 - DNA, 21 bp, Homo sapiens
gtgtaaagcayatggtgaatt

SEQ ID NO: 8449 - DNA, 21 bp, Homo sapiens
attgagtagamatttttgaga

SEQ ID NO: 8450 - DNA, 21 bp, Homo sapiens
cttaatcccaygcctcctgct

SEQ ID NO: 8451 - DNA, 21 bp, Homo sapiens
cagaggtctayatttgtcagg

SEQ ID NO: 8452 - DNA, 21 bp, Homo sapiens
gaaaggtagayggcaccgaga

SEQ ID NO: 8453 - DNA, 21 bp, Homo sapiens
actttcttcayccgtaaattg

SEQ ID NO: 8454 - DNA, 21 bp, Homo sapiens
gaagaaatacrcctgatgatt

SEQ ID NO: 8455 - DNA, 21 bp, Homo sapiens
cttggaaaaaytgatagaaat

SEQ ID NO: 8456 - DNA, 21 bp, Homo sapiens
tgacaaagaaygcaagatcgt

SEQ ID NO: 8457 - DNA, 21 bp, Homo sapiens
gaggctgagtkaaggcaatat

SEQ ID NO: 8458 - DNA, 21 bp, Homo sapiens
gaaaatgttgwtgaaattcat

SEQ ID NO: 8459 - DNA, 21 bp, Homo sapiens
agcagccccawctggagtaat

SEQ ID NO: 8460 - DNA, 21 bp, Homo sapiens
atagcagaccrtcctcatgtt

SEQ ID NO: 8461 - DNA, 21 bp, Homo sapiens
cataatcataycttggcataa

SEQ ID NO: 8462 - DNA, 21 bp, Homo sapiens
tcccacatcgktctgctttgg

SEQ ID NO: 8463 - DNA, 21 bp, Homo sapiens
agactctacaytcctttttat

SEQ ID NO: 8464 - DNA, 21 bp, Homo sapiens
cacccacagaygaattatttg

SEQ ID NO: 8465 - DNA, 21 bp, Homo sapiens
caggctccatytttcctttct

SEQ ID NO: 8466 - DNA, 21 bp, Homo sapiens
gtaaagttagrgagtagcaca

SEQ ID NO: 8467 - DNA, 21 bp, Homo sapiens
gggtgaaagayagaaagtcat

SEQ ID NO: 8468 - DNA, 21 bp, Homo sapiens
cttgcatctayatctgtgtcc

SEQ ID NO: 8469 - DNA, 21 bp, Homo sapiens
tcacatgtatkatcagattta

SEQ ID NO: 8470 - DNA, 21 bp, Homo sapiens
tgcttacacawcctatgcccc

SEQ ID NO: 8471 - DNA, 21 bp, Homo sapiens
ttcacacagcraaggaataca

SEQ ID NO: 8472 - DNA, 21 bp, Homo sapiens
atcatacctaycacctggtaa

SEQ ID NO: 8473 - DNA, 21 bp, Homo sapiens
taatcaactawggagaaatat

SEQ ID NO: 8474 - DNA, 21 bp, Homo sapiens
acccaggaggmtggcctgaag

SEQ ID NO: 8475 - DNA, 21 bp, Homo sapiens
ttagcaagacmatagaatgct

SEQ ID NO: 8476 - DNA, 21 bp, Homo sapiens
tacgccatcarttgtgcatgt

SEQ ID NO: 8477 - DNA, 21 bp, Homo sapiens
caagctaaagyagtgtttagg

SEQ ID NO: 8478 - DNA, 21 bp, Homo sapiens
tgaaaactttyccaaggtggt

SEQ ID NO: 8479 - DNA, 21 bp, Homo sapiens
cagttttgggkttttttttgt

SEQ ID NO: 8480 - DNA, 21 bp, Homo sapiens
ataaaataaaytgaacgtaga

SEQ ID NO: 8481 - DNA, 21 bp, Homo sapiens
cttgctctagygatacaagcc

SEQ ID NO: 8482 - DNA, 21 bp, Homo sapiens
cctcatgctgyaaatctaagg

SEQ ID NO: 8483 - DNA, 21 bp, Homo sapiens
aagaaatatgwtctctcagat

SEQ ID NO: 8484 - DNA, 21 bp, Homo sapiens
ttgtaaaccastgattcccca

SEQ ID NO: 8485 - DNA, 21 bp, Homo sapiens
aacactatgcrataacttgaa

SEQ ID NO: 8486 - DNA, 21 bp, Homo sapiens
gaaaacaaaawgcacctaaat

SEQ ID NO: 8487 - DNA, 21 bp, Homo sapiens
gtgacttggartcaggggagt

SEQ ID NO: 8488 - DNA, 21 bp, Homo sapiens
ctaacaatttyggtttctaaa

SEQ ID NO: 8489 - DNA, 21 bp, Homo sapiens
ttatcaggggwataccattac

SEQ ID NO: 8490 - DNA, 21 bp, Homo sapiens
agtagaaaatraattacacta

SEQ ID NO: 8491 - DNA, 21 bp, Homo sapiens
aagccctactytttttctatg

SEQ ID NO: 8492 - DNA, 21 bp, Homo sapiens
gggccctcgcygagaacctga

SEQ ID NO: 8493 - DNA, 21 bp, Homo sapiens
tggttaatgcrgagcgtgttt

SEQ ID NO: 8494 - DNA, 21 bp, Homo sapiens
gcctgtaaagyagtgtatggc

SEQ ID NO: 8495 - DNA, 21 bp, Homo sapiens
ccttggccttygccacataga

SEQ ID NO: 8496 - DNA, 21 bp, Homo sapiens
gttttacccaytattacagcc

SEQ ID NO: 8497 - DNA, 21 bp, Homo sapiens
tcctcaaaatygctgggtaga

SEQ ID NO: 8498 - DNA, 21 bp, Homo sapiens
agctgcctatmacttcccagc

SEQ ID NO: 8499 - DNA, 21 bp, Homo sapiens
tgaaagaagcygggttggggt

SEQ ID NO: 8500 - DNA, 21 bp, Homo sapiens
agtccattacrttgttaacac

SEQ ID NO: 8501 - DNA, 21 bp, Homo sapiens
caaaatgaaakggaacaattc

SEQ ID NO: 8502 - DNA, 21 bp, Homo sapiens
gtgtggagggwtgtagggtaa

SEQ ID NO: 8503 - DNA, 21 bp, Homo sapiens
ctgaacacggyattttaaaac

SEQ ID NO: 8504 - DNA, 21 bp, Homo sapiens
gaactactttsaattccctca

SEQ ID NO: 8505 - DNA, 21 bp, Homo sapiens
caacggtaggkaccatgcata

SEQ ID NO: 8506 - DNA, 21 bp, Homo sapiens
tggaaaccttrctttaaaatt

SEQ ID NO: 8507 - DNA, 21 bp, Homo sapiens
catgcataatsgttggctaaa

SEQ ID NO: 8508 - DNA, 21 bp, Homo sapiens
tgaagcaggartagggaaagt

SEQ ID NO: 8509 - DNA, 21 bp, Homo sapiens
atcttatttcyccagcaaata

SEQ ID NO: 8510 - DNA, 21 bp, Homo sapiens
atcttcccaartctaccttta

SEQ ID NO: 8511 - DNA, 21 bp, Homo sapiens
aaacagtgagmtacagccatt

SEQ ID NO: 8512 - DNA, 21 bp, Homo sapiens
aacagctactygtaccccaat

SEQ ID NO: 8513 - DNA, 21 bp, Homo sapiens
tttggtctaakgttaactccc

SEQ ID NO: 8514 - DNA, 21 bp, Homo sapiens
gtgactgatgraaaagaagag

SEQ ID NO: 8515 - DNA, 21 bp, Homo sapiens
acgtatcatgyagttggcatc

SEQ ID NO: 8516 - DNA, 21 bp, Homo sapiens
ggaaaaatgtwatccacttct

SEQ ID NO: 8517 - DNA, 21 bp, Homo sapiens
tgaactgcgcsgaactccacc

SEQ ID NO: 8518 - DNA, 21 bp, Homo sapiens
aagtagtcaayaaaaattaaa

SEQ ID NO: 8519 - DNA, 21 bp, Homo sapiens
gtggggtagcraatcttatat

SEQ ID NO: 8520 - DNA, 21 bp, Homo sapiens
ggtacgacctycaaagttgtc

SEQ ID NO: 8521 - DNA, 21 bp, Homo sapiens
agcagagagawaaagaataag

SEQ ID NO: 8522 - DNA, 21 bp, Homo sapiens
ctattcctagsatggcctcac

SEQ ID NO: 8523 - DNA, 21 bp, Homo sapiens
cctctcctgcsagagttgagg

SEQ ID NO: 8524 - DNA, 21 bp, Homo sapiens
actttggtcamagtctctcag

SEQ ID NO: 8525 - DNA, 21 bp, Homo sapiens
gaagagtttcmtgaatccaaa

SEQ ID NO: 8526 - DNA, 21 bp, Homo sapiens
cacccctgagytcaatgacca

SEQ ID NO: 8527 - DNA, 21 bp, Homo sapiens
caaagaatgaragatgtctta

SEQ ID NO: 8528 - DNA, 21 bp, Homo sapiens
ataaaatcagyactatccttg

SEQ ID NO: 8529 - DNA, 21 bp, Homo sapiens
cactaatgttkcccagcctgt

SEQ ID NO: 8530 - DNA, 21 bp, Homo sapiens
aaaacaaaccrccgttaacac

SEQ ID NO: 8531 - DNA, 21 bp, Homo sapiens
ctgcctgtagygtgatttctt

SEQ ID NO: 8532 - DNA, 21 bp, Homo sapiens
gggagaaaggkaagttagggg

SEQ ID NO: 8533 - DNA, 21 bp, Homo sapiens
agcacatttayatcctttcct

SEQ ID NO: 8534 - DNA, 21 bp, Homo sapiens
tttctattaarccattcatta

SEQ ID NO: 8535 - DNA, 21 bp, Homo sapiens
cctgcttccaygcaggtgtcc

SEQ ID NO: 8536 - DNA, 21 bp, Homo sapiens
atattacatawtgagaatgag

SEQ ID NO: 8537 - DNA, 21 bp, Homo sapiens
tgatgccaatyacctgctgaa

SEQ ID NO: 8538 - DNA, 21 bp, Homo sapiens
ttgttggaaaygtagatattg

SEQ ID NO: 8539 - DNA, 21 bp, Homo sapiens
gcgtagtctcrttggaactat

SEQ ID NO: 8540 - DNA, 21 bp, Homo sapiens
agagccaatastgctttacaa

SEQ ID NO: 8541 - DNA, 21 bp, Homo sapiens
cattctaggcrgtggcctcag

SEQ ID NO: 8542 - DNA, 21 bp, Homo sapiens
cctcatatatrtgtaaaatgc

SEQ ID NO: 8543 - DNA, 21 bp, Homo sapiens
tcatgtttttwaaaaaagtag

SEQ ID NO: 8544 - DNA, 21 bp, Homo sapiens
gaatattaaasttgttgagtc

SEQ ID NO: 8545 - DNA, 21 bp, Homo sapiens
agatttaaacwccttcatctt

SEQ ID NO: 8546 - DNA, 21 bp, Homo sapiens
ctgtcacgtgrgcctctgggg

SEQ ID NO: 8547 - DNA, 21 bp, Homo sapiens
agcaatgactwatttcaaagg

SEQ ID NO: 8548 - DNA, 21 bp, Homo sapiens
ggaatttatgrtagaaggatc

SEQ ID NO: 8549 - DNA, 21 bp, Homo sapiens
ttcatctttcygtatctttga

SEQ ID NO: 8550 - DNA, 21 bp, Homo sapiens
attttatgatmtattttaaca

SEQ ID NO: 8551 - DNA, 21 bp, Homo sapiens
gaatgagaggyggcccatata

SEQ ID NO: 8552 - DNA, 21 bp, Homo sapiens
aaatttgagawtctatttaaa

SEQ ID NO: 8553 - DNA, 21 bp, Homo sapiens
acagatatatrtggattaatt

SEQ ID NO: 8554 - DNA, 21 bp, Homo sapiens
tttctgctacrtcaagccact

SEQ ID NO: 8555 - DNA, 21 bp, Homo sapiens
attatcacctycaccataaat

SEQ ID NO: 8556 - DNA, 21 bp, Homo sapiens
taggcccatayggtcctcact

SEQ ID NO: 8557 - DNA, 21 bp, Homo sapiens
taataaagacwaacttggtga

SEQ ID NO: 8558 - DNA, 21 bp, Homo sapiens
ctccagtgtargaagaaatat

SEQ ID NO: 8559 - DNA, 21 bp, Homo sapiens
ccaactgaagygtgttgttcc

SEQ ID NO: 8560 - DNA, 21 bp, Homo sapiens
gctattgtttsttttcatcat

SEQ ID NO: 8561 - DNA, 21 bp, Homo sapiens
accaatatctwtaaagctttt

SEQ ID NO: 8562 - DNA, 21 bp, Homo sapiens
ccgtgaagctrctcttgccca

SEQ ID NO: 8563 - DNA, 21 bp, Homo sapiens
tgtcattagasgaggaggaaa

SEQ ID NO: 8564 - DNA, 21 bp, Homo sapiens
gaaatagagaygtaaggttta

SEQ ID NO: 8565 - DNA, 21 bp, Homo sapiens
ctatttcactrgagttcctgt

SEQ ID NO: 8566 - DNA, 21 bp, Homo sapiens
atgaatatttwaaaatattga

SEQ ID NO: 8567 - DNA, 21 bp, Homo sapiens
atagagaaacragaagttcag

SEQ ID NO: 8568 - DNA, 21 bp, Homo sapiens
ctctgtatttktacttcttct

SEQ ID NO: 8569 - DNA, 21 bp, Homo sapiens
gtcaatcagcraatttccact

SEQ ID NO: 8570 - DNA, 21 bp, Homo sapiens
aaaatttaaayaaatctttct

SEQ ID NO: 8571 - DNA, 21 bp, Homo sapiens
ggaaaggacayggggcttccg

SEQ ID NO: 8572 - DNA, 21 bp, Homo sapiens
atttgtaattrttgacaagat

SEQ ID NO: 8573 - DNA, 21 bp, Homo sapiens
gttctgcatcmgtggattgaa

SEQ ID NO: 8574 - DNA, 21 bp, Homo sapiens
ggggaagggawttcagtgatg

SEQ ID NO: 8575 - DNA, 21 bp, Homo sapiens
tataatttacygtagtgtcat

SEQ ID NO: 8576 - DNA, 21 bp, Homo sapiens
tgtgggagaawatatgatcat

SEQ ID NO: 8577 - DNA, 21 bp, Homo sapiens
caagacaattyttcatttctg

SEQ ID NO: 8578 - DNA, 21 bp, Homo sapiens
gtccctgcctkgattatgttc

SEQ ID NO: 8579 - DNA, 21 bp, Homo sapiens
tctgcaaatcwcagttcttac

SEQ ID NO: 8580 - DNA, 21 bp, Homo sapiens
gactctttacyttgtatccaa

SEQ ID NO: 8581 - DNA, 21 bp, Homo sapiens
aatacaaaagygcctaagagt

SEQ ID NO: 8582 - DNA, 21 bp, Homo sapiens
aggtactaaarcctaattata

SEQ ID NO: 8583 - DNA, 21 bp, Homo sapiens
tcgccaactaygttatctgtg

SEQ ID NO: 8584 - DNA, 21 bp, Homo sapiens
cataaatatcmagtgacattt

SEQ ID NO: 8585 - DNA, 21 bp, Homo sapiens
ccgtgtcccayccccacacac

SEQ ID NO: 8586 - DNA, 21 bp, Homo sapiens
gtgtcctaagscgggcacggt

SEQ ID NO: 8587 - DNA, 21 bp, Homo sapiens
tgctctcaccraatccttaag

SEQ ID NO: 8588 - DNA, 21 bp, Homo sapiens
actggctcacycttacataat

SEQ ID NO: 8589 - DNA, 21 bp, Homo sapiens
aattagctaargaataattca

SEQ ID NO: 8590 - DNA, 21 bp, Homo sapiens
gaggtacgacrtttaaaactg

SEQ ID NO: 8591 - DNA, 21 bp, Homo sapiens
ttgtaattccrtagtgtttca

SEQ ID NO: 8592 - DNA, 21 bp, Homo sapiens
ttcaaactcawaacatagtat

SEQ ID NO: 8593 - DNA, 21 bp, Homo sapiens
ttttaaaaccytcagttgctt

SEQ ID NO: 8594 - DNA, 21 bp, Homo sapiens
tttttcacttmtttgaaccgt

SEQ ID NO: 8595 - DNA, 21 bp, Homo sapiens
ggctagaataytattcacctc

SEQ ID NO: 8596 - DNA, 21 bp, Homo sapiens
taacattgttktcaaatcaat

SEQ ID NO: 8597 - DNA, 21 bp, Homo sapiens
cattagagcartttctcttgc

SEQ ID NO: 8598 - DNA, 21 bp, Homo sapiens
tgcatggagarcttgcacaca

SEQ ID NO: 8599 - DNA, 21 bp, Homo sapiens
cgggaaatctrctatctcctt

SEQ ID NO: 8600 - DNA, 21 bp, Homo sapiens
ctactgtcatyctttttattt

SEQ ID NO: 8601 - DNA, 21 bp, Homo sapiens
agtgcaagacracagatacat

SEQ ID NO: 8602 - DNA, 21 bp, Homo sapiens
ggcatcagttkttgtctctgg

SEQ ID NO: 8603 - DNA, 21 bp, Homo sapiens
tagggtaccaycatccagatc

SEQ ID NO: 8604 - DNA, 21 bp, Homo sapiens
aacatgagagrgcattacaaa

SEQ ID NO: 8605 - DNA, 21 bp, Homo sapiens
cagctgtttcmaaggaaaact

SEQ ID NO: 8606 - DNA, 21 bp, Homo sapiens
tggttgtaagkaatactgaag

SEQ ID NO: 8607 - DNA, 21 bp, Homo sapiens
attttcagtcstctagtttga

SEQ ID NO: 8608 - DNA, 21 bp, Homo sapiens
aagtaaaccartgtattctgt

SEQ ID NO: 8609 - DNA, 21 bp, Homo sapiens
gcccctgtgtmaccatggcaa

SEQ ID NO: 8610 - DNA, 21 bp, Homo sapiens
ttactccccgytttggttgca

SEQ ID NO: 8611 - DNA, 21 bp, Homo sapiens
tgaggagatargaaaaacttc

SEQ ID NO: 8612 - DNA, 21 bp, Homo sapiens
tgaagtcactraaagattact

SEQ ID NO: 8613 - DNA, 21 bp, Homo sapiens
tttcttctgtrtgtgtagggc

SEQ ID NO: 8614 - DNA, 21 bp, Homo sapiens
caatctttgcrgtagggagac

SEQ ID NO: 8615 - DNA, 21 bp, Homo sapiens
tctgtcacctwatcactgccc

SEQ ID NO: 8616 - DNA, 21 bp, Homo sapiens
accttctactstgaagaggcc

SEQ ID NO: 8617 - DNA, 21 bp, Homo sapiens
gagaataaacrtagtatttac

SEQ ID NO: 8618 - DNA, 21 bp, Homo sapiens
tgaataaacargagggtatat

SEQ ID NO: 8619 - DNA, 21 bp, Homo sapiens
ataaaatgggrcatgctccaa

SEQ ID NO: 8620 - DNA, 21 bp, Homo sapiens
gatattgagcmttttaaatca

SEQ ID NO: 8621 - DNA, 21 bp, Homo sapiens
atcagggatcraatgattctc

SEQ ID NO: 8622 - DNA, 21 bp, Homo sapiens
tgttggattcyctccgtcagt

SEQ ID NO: 8623 - DNA, 21 bp, Homo sapiens
aaatgccatakggtcaatccg

SEQ ID NO: 8624 - DNA, 21 bp, Homo sapiens
acagcctctcrtgattcttgg

SEQ ID NO: 8625 - DNA, 21 bp, Homo sapiens
cagatacttayactgtacatt

SEQ ID NO: 8626 - DNA, 21 bp, Homo sapiens
tttcattactrtatttttcct

SEQ ID NO: 8627 - DNA, 21 bp, Homo sapiens
tgtcattgtcrttctcagaaa

SEQ ID NO: 8628 - DNA, 21 bp, Homo sapiens
agctctgctcrcctgcaaagg

SEQ ID NO: 8629 - DNA, 21 bp, Homo sapiens
tcacttgtcakttgccagttc

SEQ ID NO: 8630 - DNA, 21 bp, Homo sapiens
ccttgaaacayggtttcaagg

SEQ ID NO: 8631 - DNA, 21 bp, Homo sapiens
atgtttgttgmatgaatgagt

SEQ ID NO: 8632 - DNA, 21 bp, Homo sapiens
ttacaatcttrgggggcaaga

SEQ ID NO: 8633 - DNA, 21 bp, Homo sapiens
gagctgtagayatattatatt

SEQ ID NO: 8634 - DNA, 21 bp, Homo sapiens
acttaaagagytcactgcttc

SEQ ID NO: 8635 - DNA, 21 bp, Homo sapiens
aaactacagaygtcaatcttg

SEQ ID NO: 8636 - DNA, 21 bp, Homo sapiens
tagcaacagcrctttaagtta

SEQ ID NO: 8637 - DNA, 21 bp, Homo sapiens
aattttaaccrtaaggggaaa

SEQ ID NO: 8638 - DNA, 21 bp, Homo sapiens
aataatgatayggggaatgct

SEQ ID NO: 8639 - DNA, 21 bp, Homo sapiens
aaatctaaacyagtgaatata

SEQ ID NO: 8640 - DNA, 21 bp, Homo sapiens
gaaaagaaaayatcaaaagag

SEQ ID NO: 8641 - DNA, 21 bp, Homo sapiens
tgaccaaatgsgcccaggaaa

SEQ ID NO: 8642 - DNA, 21 bp, Homo sapiens
tgatgaatgayggaaacacca

SEQ ID NO: 8643 - DNA, 21 bp, Homo sapiens
tgttctgttcraaagggggaa

SEQ ID NO: 8644 - DNA, 21 bp, Homo sapiens
gcagttctatygattccagtt

SEQ ID NO: 8645 - DNA, 21 bp, Homo sapiens
tcattctctcygtatactgtg

SEQ ID NO: 8646 - DNA, 21 bp, Homo sapiens
cccacaaaaawgtttcttctg

SEQ ID NO: 8647 - DNA, 21 bp, Homo sapiens
taacttaacayggttccttca

SEQ ID NO: 8648 - DNA, 21 bp, Homo sapiens
tcatagcataygaattcttca

SEQ ID NO: 8649 - DNA, 21 bp, Homo sapiens
agcagctcctsaagaagaaac

SEQ ID NO: 8650 - DNA, 21 bp, Homo sapiens
cggctctcgaraaggttactt

SEQ ID NO: 8651 - DNA, 21 bp, Homo sapiens
aagagttccawgataaaagta

SEQ ID NO: 8652 - DNA, 21 bp, Homo sapiens
ttggaagggtrtatgagaata

SEQ ID NO: 8653 - DNA, 21 bp, Homo sapiens
atctttgcctyttagtttttg

SEQ ID NO: 8654 - DNA, 21 bp, Homo sapiens
ttttttatccyttgagtacaa

SEQ ID NO: 8655 - DNA, 21 bp, Homo sapiens
tgccaacttarccatgcaaaa

SEQ ID NO: 8656 - DNA, 21 bp, Homo sapiens
ctggcaaaaastttcaaggaa

SEQ ID NO: 8657 - DNA, 21 bp, Homo sapiens
taatctctctrtatataatgg

SEQ ID NO: 8658 - DNA, 21 bp, Homo sapiens
ctgccccacayccccaagtaa

SEQ ID NO: 8659 - DNA, 21 bp, Homo sapiens
aaaaaaaatgwttaagtaacc

SEQ ID NO: 8660 - DNA, 21 bp, Homo sapiens
aggatatatcratagaactca

SEQ ID NO: 8661 - DNA, 21 bp, Homo sapiens
caaaagactcmatatttttaa

SEQ ID NO: 8662 - DNA, 21 bp, Homo sapiens
actacatgtarcaatatggat

SEQ ID NO: 8663 - DNA, 21 bp, Homo sapiens
aacatatattmtttctgtata

SEQ ID NO: 8664 - DNA, 21 bp, Homo sapiens
gaaaaggtatytccaatttaa

SEQ ID NO: 8665 - DNA, 21 bp, Homo sapiens
ctgtgttgtamcctaaggata

SEQ ID NO: 8666 - DNA, 21 bp, Homo sapiens
tttgtcattaytctaattaaa

SEQ ID NO: 8667 - DNA, 21 bp, Homo sapiens
tttattctctyagtttacccc

SEQ ID NO: 8668 - DNA, 21 bp, Homo sapiens
ccaagtgagayaagaaagaat

SEQ ID NO: 8669 - DNA, 21 bp, Homo sapiens
tcaaaatttcycaaccaaata

SEQ ID NO: 8670 - DNA, 21 bp, Homo sapiens
catggagaggrtctaaactgt

SEQ ID NO: 8671 - DNA, 21 bp, Homo sapiens
ttgggaaagaycactgtgcct

SEQ ID NO: 8672 - DNA, 21 bp, Homo sapiens
ccaagtaatamagccttcaat

SEQ ID NO: 8673 - DNA, 21 bp, Homo sapiens
aattccaattragaaagtcta

SEQ ID NO: 8674 - DNA, 21 bp, Homo sapiens
agaaaagcaaygccatagact

SEQ ID NO: 8675 - DNA, 21 bp, Homo sapiens
atcctctcaasggaaaaaaaa

SEQ ID NO: 8676 - DNA, 21 bp, Homo sapiens
ttgccagcagrtggcttatta

SEQ ID NO: 8677 - DNA, 21 bp, Homo sapiens
cctcaatcttmtttttctcat

SEQ ID NO: 8678 - DNA, 21 bp, Homo sapiens
aaccatcttcmataaccctcc

SEQ ID NO: 8679 - DNA, 21 bp, Homo sapiens
taaacatatcrtatataaact

SEQ ID NO: 8680 - DNA, 21 bp, Homo sapiens
ttctttgaaartgtcatggtc

SEQ ID NO: 8681 - DNA, 21 bp, Homo sapiens
taagagtctgytgaatcccga

SEQ ID NO: 8682 - DNA, 21 bp, Homo sapiens
tcacttatgtsagctcagtga

SEQ ID NO: 8683 - DNA, 21 bp, Homo sapiens
ggaagacattyaaatagaatt

SEQ ID NO: 8684 - DNA, 21 bp, Homo sapiens
aaaatagcctycatatctttt

SEQ ID NO: 8685 - DNA, 21 bp, Homo sapiens
aactctttaayggttaatgat

SEQ ID NO: 8686 - DNA, 21 bp, Homo sapiens
gtcattgtcayacaattctgt

SEQ ID NO: 8687 - DNA, 21 bp, Homo sapiens
tgatacaggcraagtctgagc

SEQ ID NO: 8688 - DNA, 21 bp, Homo sapiens
gtgtgtcttcstttttaaaaa

SEQ ID NO: 8689 - DNA, 21 bp, Homo sapiens
ccccaaactayggctgaattg

SEQ ID NO: 8690 - DNA, 21 bp, Homo sapiens
ctaataaaatrtttaaagttc

SEQ ID NO: 8691 - DNA, 21 bp, Homo sapiens
ttttaaaattmattttcttcc

SEQ ID NO: 8692 - DNA, 21 bp, Homo sapiens
gttcaagaatytatttatttc

SEQ ID NO: 8693 - DNA, 21 bp, Homo sapiens
attgcagcagragatataggc

SEQ ID NO: 8694 - DNA, 21 bp, Homo sapiens
atataatatcyacttcatata

SEQ ID NO: 8695 - DNA, 21 bp, Homo sapiens
agctagggacrgtgtcaaatt

SEQ ID NO: 8696 - DNA, 21 bp, Homo sapiens
aggtacatttkctctttaaga

SEQ ID NO: 8697 - DNA, 21 bp, Homo sapiens
tccaagtactytttccatgtc

SEQ ID NO: 8698 - DNA, 21 bp, Homo sapiens
agctgttaggytccatgattc

SEQ ID NO: 8699 - DNA, 21 bp, Homo sapiens
gagagccagtmcagcagtcat

SEQ ID NO: 8700 - DNA, 21 bp, Homo sapiens
cagttactttsggacagtcta

SEQ ID NO: 8701 - DNA, 21 bp, Homo sapiens
aaaacgaaggwaagagaagaa

SEQ ID NO: 8702 - DNA, 21 bp, Homo sapiens
tggaaatatgmgggactaact

SEQ ID NO: 8703 - DNA, 21 bp, Homo sapiens
tgtctcctagycttccttcag

SEQ ID NO: 8704 - DNA, 21 bp, Homo sapiens
gtcctctccaycagtcaagga

SEQ ID NO: 8705 - DNA, 21 bp, Homo sapiens
ctcccaagcarttagtcaact

SEQ ID NO: 8706 - DNA, 21 bp, Homo sapiens
accataccctscagagaaacc

SEQ ID NO: 8707 - DNA, 21 bp, Homo sapiens
actttaaaatytaatgctata

SEQ ID NO: 8708 - DNA, 21 bp, Homo sapiens
aacctgtggtkaaaagcatgt

SEQ ID NO: 8709 - DNA, 21 bp, Homo sapiens
atattagctcyctttcctata

SEQ ID NO: 8710 - DNA, 21 bp, Homo sapiens
gccacaggaamtgaattatgc

SEQ ID NO: 8711 - DNA, 21 bp, Homo sapiens
gcatactgctrtaatattata

SEQ ID NO: 8712 - DNA, 21 bp, Homo sapiens
cagaaattgartcaggaatga

SEQ ID NO: 8713 - DNA, 21 bp, Homo sapiens
atagtacaaayataattgcag

SEQ ID NO: 8714 - DNA, 21 bp, Homo sapiens
agataagaccyaaggaggatc

SEQ ID NO: 8715 - DNA, 21 bp, Homo sapiens
aaagatgctamagaactgcaa

SEQ ID NO: 8716 - DNA, 21 bp, Homo sapiens
ctgagcgaacrgcacatgggc

SEQ ID NO: 8717 - DNA, 21 bp, Homo sapiens
tttcatgagargggttgttgt

SEQ ID NO: 8718 - DNA, 21 bp, Homo sapiens
tttcttccatkagcaaggact

SEQ ID NO: 8719 - DNA, 21 bp, Homo sapiens
ggagcaaactwatacagaaat

SEQ ID NO: 8720 - DNA, 21 bp, Homo sapiens
attgatacctragtaaaaggg

SEQ ID NO: 8721 - DNA, 21 bp, Homo sapiens
ctgccctgctyaacctccagt

SEQ ID NO: 8722 - DNA, 21 bp, Homo sapiens
caaggaaacawggtccctgaa

SEQ ID NO: 8723 - DNA, 21 bp, Homo sapiens
gaatgtgacaraaatttgagt

SEQ ID NO: 8724 - DNA, 21 bp, Homo sapiens
gtaaagtgagrtaaggatgag

SEQ ID NO: 8725 - DNA, 21 bp, Homo sapiens
atggcatgaaygaatgaagaa

SEQ ID NO: 8726 - DNA, 21 bp, Homo sapiens
aatataggaawaactgcttgt

SEQ ID NO: 8727 - DNA, 21 bp, Homo sapiens
ttggctataaratacaacgat

SEQ ID NO: 8728 - DNA, 21 bp, Homo sapiens
aagtttgttarctttcaatca

SEQ ID NO: 8729 - DNA, 21 bp, Homo sapiens
gacactggaarggcagatgga

SEQ ID NO: 8730 - DNA, 21 bp, Homo sapiens
taaatacatgyagaaggaaac

SEQ ID NO: 8731 - DNA, 21 bp, Homo sapiens
tcctcccttcrtgtccaatgt

SEQ ID NO: 8732 - DNA, 21 bp, Homo sapiens
attctaaagayaaaaaaaaaa

SEQ ID NO: 8733 - DNA, 21 bp, Homo sapiens
ctctgtctttscacaactggc

SEQ ID NO: 8734 - DNA, 21 bp, Homo sapiens
tcacccaaggyccacagcaca

SEQ ID NO: 8735 - DNA, 21 bp, Homo sapiens
ttgtatttttwaatttttcta

SEQ ID NO: 8736 - DNA, 21 bp, Homo sapiens
gtggtctcaamacaacagctc

SEQ ID NO: 8737 - DNA, 21 bp, Homo sapiens
agaggccagcygcattgcttg

SEQ ID NO: 8738 - DNA, 21 bp, Homo sapiens
ccacctaatgratcaccatgg

SEQ ID NO: 8739 - DNA, 21 bp, Homo sapiens
ggaacagaaawtgattctgaa

SEQ ID NO: 8740 - DNA, 21 bp, Homo sapiens
ataatgaagakagatatgtgt

SEQ ID NO: 8741 - DNA, 21 bp, Homo sapiens
ggctagtgatyagagacttgt

SEQ ID NO: 8742 - DNA, 21 bp, Homo sapiens
acattatgatrgggtgttttt

SEQ ID NO: 8743 - DNA, 21 bp, Homo sapiens
cattggctgtrattgattcat

SEQ ID NO: 8744 - DNA, 21 bp, Homo sapiens
acggctccagrataacaatag

SEQ ID NO: 8745 - DNA, 21 bp, Homo sapiens
tcctttactaycccgtagttt

SEQ ID NO: 8746 - DNA, 21 bp, Homo sapiens
taaacctcaamatgaaacaaa

SEQ ID NO: 8747 - DNA, 21 bp, Homo sapiens
ggagccaaaaytagcaggaga

SEQ ID NO: 8748 - DNA, 21 bp, Homo sapiens
ggacagcagcractctaagaa

SEQ ID NO: 8749 - DNA, 21 bp, Homo sapiens
ctcttttgggkgtgctaaata

SEQ ID NO: 8750 - DNA, 21 bp, Homo sapiens
tgcaacagtcrtttgagaaaa

SEQ ID NO: 8751 - DNA, 21 bp, Homo sapiens
ctgaaccttgytttgctaatt

SEQ ID NO: 8752 - DNA, 21 bp, Homo sapiens
caaatatcagkgatctgtgct

SEQ ID NO: 8753 - DNA, 21 bp, Homo sapiens
cagacaggagmcaaggaaata

SEQ ID NO: 8754 - DNA, 21 bp, Homo sapiens
tgaaggaggayctatctacat

SEQ ID NO: 8755 - DNA, 21 bp, Homo sapiens
cagacgaaaakaagtaaagta

SEQ ID NO: 8756 - DNA, 21 bp, Homo sapiens
agccaaaatayacctacccct

SEQ ID NO: 8757 - DNA, 21 bp, Homo sapiens
ctgagccccayggactgccat

SEQ ID NO: 8758 - DNA, 21 bp, Homo sapiens
agaataggtgmttcaaatgtg

SEQ ID NO: 8759 - DNA, 21 bp, Homo sapiens
aaagccgaggraataaccttg

SEQ ID NO: 8760 - DNA, 21 bp, Homo sapiens
gtgcccccccsaatccagggc

SEQ ID NO: 8761 - DNA, 21 bp, Homo sapiens
tttagctctcraagatggacg

SEQ ID NO: 8762 - DNA, 21 bp, Homo sapiens
tgaaatttctrgtcaatttac

SEQ ID NO: 8763 - DNA, 21 bp, Homo sapiens
acaagcagttrtgttcggggt

SEQ ID NO: 8764 - DNA, 21 bp, Homo sapiens
ttttgaatcaytgggcaattc

SEQ ID NO: 8765 - DNA, 21 bp, Homo sapiens
aaccctacacwttcccgactt

SEQ ID NO: 8766 - DNA, 21 bp, Homo sapiens
ctgtgtgtacraagaaaaata

SEQ ID NO: 8767 - DNA, 21 bp, Homo sapiens
tatggcaaatyagacaaatac

SEQ ID NO: 8768 - DNA, 21 bp, Homo sapiens
gaacaccaaakcatatgcaga

SEQ ID NO: 8769 - DNA, 21 bp, Homo sapiens
gtgctttgtgraaggtagaac

SEQ ID NO: 8770 - DNA, 21 bp, Homo sapiens
agaaaagcagygttgatacta

SEQ ID NO: 8771 - DNA, 21 bp, Homo sapiens
gaaatatacakataggaaaat

SEQ ID NO: 8772 - DNA, 21 bp, Homo sapiens
ctgctttactrtccacttgta

SEQ ID NO: 8773 - DNA, 21 bp, Homo sapiens
attaggaaaawatccaaaact

SEQ ID NO: 8774 - DNA, 21 bp, Homo sapiens
taccatgcagygtatgaatgg

SEQ ID NO: 8775 - DNA, 21 bp, Homo sapiens
gtggtggatcyccggaactaa

SEQ ID NO: 8776 - DNA, 21 bp, Homo sapiens
tgtgaggagakgaaggtatac

SEQ ID NO: 8777 - DNA, 21 bp, Homo sapiens
tagacactctwaggtgtgtcc

SEQ ID NO: 8778 - DNA, 21 bp, Homo sapiens
ttttggttgtrtgtaaaaagc

SEQ ID NO: 8779 - DNA, 21 bp, Homo sapiens
atctttcagtratctatgcca

SEQ ID NO: 8780 - DNA, 21 bp, Homo sapiens
atttttatgaygtcctatttc

SEQ ID NO: 8781 - DNA, 21 bp, Homo sapiens
tgagtcatctwcagtaattct

SEQ ID NO: 8782 - DNA, 21 bp, Homo sapiens
gggagggggtrcatgggggtg

SEQ ID NO: 8783 - DNA, 21 bp, Homo sapiens
atgaaatatcrtcgcttcctg

SEQ ID NO: 8784 - DNA, 21 bp, Homo sapiens
gcataggaaaractatctttt

SEQ ID NO: 8785 - DNA, 21 bp, Homo sapiens
agtctatttargttgtctaat

SEQ ID NO: 8786 - DNA, 21 bp, Homo sapiens
attacagtttkggactacaca

SEQ ID NO: 8787 - DNA, 21 bp, Homo sapiens
taaaaattaaygagaaattaa

SEQ ID NO: 8788 - DNA, 21 bp, Homo sapiens
actaccttgtycacagaaact

SEQ ID NO: 8789 - DNA, 21 bp, Homo sapiens
catttcatcaytctgagatat

SEQ ID NO: 8790 - DNA, 21 bp, Homo sapiens
ggactataaayctcacaagaa

SEQ ID NO: 8791 - DNA, 21 bp, Homo sapiens
caaagatctcraatcagattc

SEQ ID NO: 8792 - DNA, 21 bp, Homo sapiens
acatacaaggytttttgtcaa

SEQ ID NO: 8793 - DNA, 21 bp, Homo sapiens
ttttgtgcctyacaaggaaat

SEQ ID NO: 8794 - DNA, 21 bp, Homo sapiens
gtggcagtttwtctaggtctg

SEQ ID NO: 8795 - DNA, 21 bp, Homo sapiens
ttctcatgtakaaaattcatt

SEQ ID NO: 8796 - DNA, 21 bp, Homo sapiens
gatgtgcacakttagctcttt

SEQ ID NO: 8797 - DNA, 21 bp, Homo sapiens
gcagcaaaacytgacttgaac

SEQ ID NO: 8798 - DNA, 21 bp, Homo sapiens
aatttaatctstgttgttgct

SEQ ID NO: 8799 - DNA, 21 bp, Homo sapiens
attttaattamactgaaccct

SEQ ID NO: 8800 - DNA, 21 bp, Homo sapiens
aggatggtaasgaaaattaat

SEQ ID NO: 8801 - DNA, 21 bp, Homo sapiens
aaaactgtcaratttggaatg

SEQ ID NO: 8802 - DNA, 21 bp, Homo sapiens
ttttgctttcraaatgtctta

SEQ ID NO: 8803 - DNA, 21 bp, Homo sapiens
agaaagagatrataatggaag

SEQ ID NO: 8804 - DNA, 21 bp, Homo sapiens
agttggagctkctgctacctc

SEQ ID NO: 8805 - DNA, 21 bp, Homo sapiens
aagcacacaaragtcgctggt

SEQ ID NO: 8806 - DNA, 21 bp, Homo sapiens
tgtttgaaacsagatcatttc

SEQ ID NO: 8807 - DNA, 21 bp, Homo sapiens
aattggacttyggaagaaatt

SEQ ID NO: 8808 - DNA, 21 bp, Homo sapiens
agtatgaatcragatacaaat

SEQ ID NO: 8809 - DNA, 21 bp, Homo sapiens
ttttttgtgayaaatttttat

SEQ ID NO: 8810 - DNA, 21 bp, Homo sapiens
tttgagggtgsaagggagaga

SEQ ID NO: 8811 - DNA, 21 bp, Homo sapiens
tatttatttgsgtctcagata

SEQ ID NO: 8812 - DNA, 21 bp, Homo sapiens
gaaatgctttmtgggtacttc

SEQ ID NO: 8813 - DNA, 21 bp, Homo sapiens
atgtaaagaawagctagcttt

SEQ ID NO: 8814 - DNA, 21 bp, Homo sapiens
cctctcagccrtaaaggagcc

SEQ ID NO: 8815 - DNA, 21 bp, Homo sapiens
aactgttcacyttcgtttgta

SEQ ID NO: 8816 - DNA, 21 bp, Homo sapiens
cttttttgtcyacctgtttat

SEQ ID NO: 8817 - DNA, 21 bp, Homo sapiens
gcagctcagcrcaacctgcat

SEQ ID NO: 8818 - DNA, 21 bp, Homo sapiens
tatgtcttccycacctaacta

SEQ ID NO: 8819 - DNA, 21 bp, Homo sapiens
aacagtgtttstataaacact

SEQ ID NO: 8820 - DNA, 21 bp, Homo sapiens
tatattgataytggtatgttg

SEQ ID NO: 8821 - DNA, 21 bp, Homo sapiens
attttgtggawgttttttcag

SEQ ID NO: 8822 - DNA, 21 bp, Homo sapiens
aaacaagaacmaattatatgt

SEQ ID NO: 8823 - DNA, 21 bp, Homo sapiens
tctgaattctrcttcatctgt

SEQ ID NO: 8824 - DNA, 21 bp, Homo sapiens
ataaccatcarcattcataat

SEQ ID NO: 8825 - DNA, 21 bp, Homo sapiens
ataggtagctrgatataatgc

SEQ ID NO: 8826 - DNA, 21 bp, Homo sapiens
aacccaacackgcttgctata

SEQ ID NO: 8827 - DNA, 21 bp, Homo sapiens
attactaccamttttacagaa

SEQ ID NO: 8828 - DNA, 21 bp, Homo sapiens
actgttcagaratagtttttc

SEQ ID NO: 8829 - DNA, 21 bp, Homo sapiens
acagtttgctrtgcaaatatc

SEQ ID NO: 8830 - DNA, 21 bp, Homo sapiens
tggctctgtargaaatgctta

SEQ ID NO: 8831 - DNA, 21 bp, Homo sapiens
aacactttagmtagctataaa

SEQ ID NO: 8832 - DNA, 21 bp, Homo sapiens
taattgaggtrtatttctgaa

SEQ ID NO: 8833 - DNA, 21 bp, Homo sapiens
aaaagatggtytggatcaaga

SEQ ID NO: 8834 - DNA, 21 bp, Homo sapiens
tcatgggccaytgagttaccc

SEQ ID NO: 8835 - DNA, 21 bp, Homo sapiens
actttctctaragcagttagg

SEQ ID NO: 8836 - DNA, 21 bp, Homo sapiens
tagtgtttgaytcagtaatta

SEQ ID NO: 8837 - DNA, 21 bp, Homo sapiens
ctaatgaatamatcaataaaa

SEQ ID NO: 8838 - DNA, 21 bp, Homo sapiens
gatatacttayaccagccaaa

SEQ ID NO: 8839 - DNA, 21 bp, Homo sapiens
gatctcaccarttacatcaac

SEQ ID NO: 8840 - DNA, 21 bp, Homo sapiens
attgtatttcrtcttggatga

SEQ ID NO: 8841 - DNA, 21 bp, Homo sapiens
taaatgaattktagtgtatac

SEQ ID NO: 8842 - DNA, 21 bp, Homo sapiens
tgggagattcracatagtgaa

SEQ ID NO: 8843 - DNA, 21 bp, Homo sapiens
atgattttttwaaatggtgct

SEQ ID NO: 8844 - DNA, 21 bp, Homo sapiens
aaactatatayacagaaagcc

SEQ ID NO: 8845 - DNA, 21 bp, Homo sapiens
cagatggttgktctcattctt

SEQ ID NO: 8846 - DNA, 21 bp, Homo sapiens
ggtaaaagagsaagaacctaa

SEQ ID NO: 8847 - DNA, 21 bp, Homo sapiens
caatcatttayttttcagagc

SEQ ID NO: 8848 - DNA, 21 bp, Homo sapiens
atttattgtgrttaaatatgc

SEQ ID NO: 8849 - DNA, 21 bp, Homo sapiens
gagacagaacyaccatcctct

SEQ ID NO: 8850 - DNA, 21 bp, Homo sapiens
gccgacagacmattttaaata

SEQ ID NO: 8851 - DNA, 21 bp, Homo sapiens
agtggtcaatkttaaagaaat

SEQ ID NO: 8852 - DNA, 21 bp, Homo sapiens
ctaaaagcatrtaaattgaga

SEQ ID NO: 8853 - DNA, 21 bp, Homo sapiens
aatcattagargctattatga

SEQ ID NO: 8854 - DNA, 21 bp, Homo sapiens
atttataatasagccacaaaa

SEQ ID NO: 8855 - DNA, 21 bp, Homo sapiens
gagaagagctycctaggcaaa

SEQ ID NO: 8856 - DNA, 21 bp, Homo sapiens
cagaaatacawagaataataa

SEQ ID NO: 8857 - DNA, 21 bp, Homo sapiens
tagaattataktggaggcaaa

SEQ ID NO: 8858 - DNA, 21 bp, Homo sapiens
agagaaccctyatctatctgg

SEQ ID NO: 8859 - DNA, 21 bp, Homo sapiens
tttggacttaycattttggcc

SEQ ID NO: 8860 - DNA, 21 bp, Homo sapiens
cccaaagggayggatttgaaa

SEQ ID NO: 8861 - DNA, 21 bp, Homo sapiens
atatcagaatyaaagcaataa

SEQ ID NO: 8862 - DNA, 21 bp, Homo sapiens
cagtggtttaytgtataaaat

SEQ ID NO: 8863 - DNA, 21 bp, Homo sapiens
cccacataacyaacatacctc

SEQ ID NO: 8864 - DNA, 21 bp, Homo sapiens
tttaaaatgcrctctactcac

SEQ ID NO: 8865 - DNA, 21 bp, Homo sapiens
tgttggtgatyatacaaagct

SEQ ID NO: 8866 - DNA, 21 bp, Homo sapiens
taaaagtgggytttttttaaa

SEQ ID NO: 8867 - DNA, 21 bp, Homo sapiens
ttcatggttayatccccagaa

SEQ ID NO: 8868 - DNA, 21 bp, Homo sapiens
acactataggrcacatctaca

SEQ ID NO: 8869 - DNA, 21 bp, Homo sapiens
taaaaaaaaamcctcaacaaa

SEQ ID NO: 8870 - DNA, 21 bp, Homo sapiens
aatccacaaastgaagagaca

SEQ ID NO: 8871 - DNA, 21 bp, Homo sapiens
gaagccaagayggctgaatag

SEQ ID NO: 8872 - DNA, 21 bp, Homo sapiens
cctcctcttaygcatactgat

SEQ ID NO: 8873 - DNA, 21 bp, Homo sapiens
gaaggtaaaamtggaagtgaa

SEQ ID NO: 8874 - DNA, 21 bp, Homo sapiens
gcctggctatkctcactttca

SEQ ID NO: 8875 - DNA, 21 bp, Homo sapiens
ctgataccagmcccccagagt

SEQ ID NO: 8876 - DNA, 21 bp, Homo sapiens
ggctatcgctyccctatcccc

SEQ ID NO: 8877 - DNA, 21 bp, Homo sapiens
tataattatgmcttattaaag

SEQ ID NO: 8878 - DNA, 21 bp, Homo sapiens
tttcagggacmattgtcaatg

SEQ ID NO: 8879 - DNA, 21 bp, Homo sapiens
tctgatgtttyttaaaatttc

SEQ ID NO: 8880 - DNA, 21 bp, Homo sapiens
gacgctcaaawctggtagaag

SEQ ID NO: 8881 - DNA, 21 bp, Homo sapiens
cttgcctatgraaataaatac

SEQ ID NO: 8882 - DNA, 21 bp, Homo sapiens
gattcagtctrttttgcgaca

SEQ ID NO: 8883 - DNA, 21 bp, Homo sapiens
tctgcattctsgacagaccca

SEQ ID NO: 8884 - DNA, 21 bp, Homo sapiens
tgtaacgaacwtcctagaggt

SEQ ID NO: 8885 - DNA, 21 bp, Homo sapiens
atatggcatcragacaagtgt

SEQ ID NO: 8886 - DNA, 21 bp, Homo sapiens
tttctggagayggggataaac

SEQ ID NO: 8887 - DNA, 21 bp, Homo sapiens
agctggagttkgaacactggt

SEQ ID NO: 8888 - DNA, 21 bp, Homo sapiens
tacattcctayagagtaaaaa

SEQ ID NO: 8889 - DNA, 21 bp, Homo sapiens
tcttgcttcaygtgtcagcat

SEQ ID NO: 8890 - DNA, 21 bp, Homo sapiens
cctattctaaractcaagatt

SEQ ID NO: 8891 - DNA, 21 bp, Homo sapiens
gagttggcctytccaccaatt

SEQ ID NO: 8892 - DNA, 21 bp, Homo sapiens
cctaatcctgsagcaaattag

SEQ ID NO: 8893 - DNA, 21 bp, Homo sapiens
agatcacaggstttactgaaa

SEQ ID NO: 8894 - DNA, 21 bp, Homo sapiens
gtaaataacaragtcattgga

SEQ ID NO: 8895 - DNA, 21 bp, Homo sapiens
ttcagttcctrgaaactaccc

SEQ ID NO: 8896 - DNA, 21 bp, Homo sapiens
gaaatgtccartaagataagg

SEQ ID NO: 8897 - DNA, 21 bp, Homo sapiens
acaagcccttsggggtacaat

SEQ ID NO: 8898 - DNA, 21 bp, Homo sapiens
gactggtaggwcaatgtataa

SEQ ID NO: 8899 - DNA, 21 bp, Homo sapiens
tttattgcagraagtttagaa

SEQ ID NO: 8900 - DNA, 21 bp, Homo sapiens
gaggtacgaawccgtgtattt

SEQ ID NO: 8901 - DNA, 21 bp, Homo sapiens
aaaggctctgrgatgcaataa

SEQ ID NO: 8902 - DNA, 21 bp, Homo sapiens
gaaaagaaggsaataaattaa

SEQ ID NO: 8903 - DNA, 21 bp, Homo sapiens
accctgaagaycaccaagatt

SEQ ID NO: 8904 - DNA, 21 bp, Homo sapiens
cgccagctatrtatctgtgaa

SEQ ID NO: 8905 - DNA, 21 bp, Homo sapiens
tctcatccttmgtagtgacag

SEQ ID NO: 8906 - DNA, 21 bp, Homo sapiens
tactgaaaaayacaatggggg

SEQ ID NO: 8907 - DNA, 21 bp, Homo sapiens
tgtaggcataytggatatctg

SEQ ID NO: 8908 - DNA, 21 bp, Homo sapiens
aaaaaaataamttgtccacta

SEQ ID NO: 8909 - DNA, 21 bp, Homo sapiens
ggtatgtaccrgctaaaatca

SEQ ID NO: 8910 - DNA, 21 bp, Homo sapiens
agcctggacartctggtatgg

SEQ ID NO: 8911 - DNA, 21 bp, Homo sapiens
aagccaactayacagtttcaa

SEQ ID NO: 8912 - DNA, 21 bp, Homo sapiens
taaagccaccwtggaattgtt

SEQ ID NO: 8913 - DNA, 21 bp, Homo sapiens
aatgagatgayagaataatgt

SEQ ID NO: 8914 - DNA, 21 bp, Homo sapiens
ccagtattgcrttaaacagtt

SEQ ID NO: 8915 - DNA, 21 bp, Homo sapiens
aaccagtgggsatatttgaag

SEQ ID NO: 8916 - DNA, 21 bp, Homo sapiens
ttcatgtcatmctcctcctac

SEQ ID NO: 8917 - DNA, 21 bp, Homo sapiens
tctaaagaggragaaataaat

SEQ ID NO: 8918 - DNA, 21 bp, Homo sapiens
aaaggaagaayctttagactg

SEQ ID NO: 8919 - DNA, 21 bp, Homo sapiens
ttggaccaggyttatgcctaa

SEQ ID NO: 8920 - DNA, 21 bp, Homo sapiens
tctctactccyagtcctgctg

SEQ ID NO: 8921 - DNA, 21 bp, Homo sapiens
ttactaccatyggagagaaag

SEQ ID NO: 8922 - DNA, 21 bp, Homo sapiens
gcattacttgwcaaagtctaa

SEQ ID NO: 8923 - DNA, 21 bp, Homo sapiens
agtgaatacawcttagacact

SEQ ID NO: 8924 - DNA, 21 bp, Homo sapiens
ttcacttggcycatccctata

SEQ ID NO: 8925 - DNA, 21 bp, Homo sapiens
tgagagaaatygataatcaag

SEQ ID NO: 8926 - DNA, 21 bp, Homo sapiens
ttcaatttttrtaaaaaacaa

SEQ ID NO: 8927 - DNA, 21 bp, Homo sapiens
atggacttacrggaaaatacc

SEQ ID NO: 8928 - DNA, 21 bp, Homo sapiens
tcatttttggytaaagtccat

SEQ ID NO: 8929 - DNA, 21 bp, Homo sapiens
aaagccacctracagaccaag

SEQ ID NO: 8930 - DNA, 21 bp, Homo sapiens
aaaaactaacrgcggaaatga

SEQ ID NO: 8931 - DNA, 21 bp, Homo sapiens
atgcctaccayggtatcaaac

SEQ ID NO: 8932 - DNA, 21 bp, Homo sapiens
tcagtttcttkttcacaattt

SEQ ID NO: 8933 - DNA, 21 bp, Homo sapiens
ttttccaaagrtaaattcagg

SEQ ID NO: 8934 - DNA, 21 bp, Homo sapiens
ctaattataaytggaaaagca

SEQ ID NO: 8935 - DNA, 21 bp, Homo sapiens
atcttggtgtwattcttacag

SEQ ID NO: 8936 - DNA, 21 bp, Homo sapiens
gagctctgcawtttatgtgcc

SEQ ID NO: 8937 - DNA, 21 bp, Homo sapiens
gttgatctggkcctccctgtt

SEQ ID NO: 8938 - DNA, 21 bp, Homo sapiens
tgctacctcayggtcacgctc

SEQ ID NO: 8939 - DNA, 21 bp, Homo sapiens
acacaggttcytttctcttgc

SEQ ID NO: 8940 - DNA, 21 bp, Homo sapiens
cttggatctcygagaagatgc

SEQ ID NO: 8941 - DNA, 21 bp, Homo sapiens
ctctcttctaytgatgatgaa

SEQ ID NO: 8942 - DNA, 21 bp, Homo sapiens
agacagacacrttcacaaaga

SEQ ID NO: 8943 - DNA, 21 bp, Homo sapiens
aaaatctttaytgatcatatt

SEQ ID NO: 8944 - DNA, 21 bp, Homo sapiens
tgcacccaacygttctgcggt

SEQ ID NO: 8945 - DNA, 21 bp, Homo sapiens
tactgacaagyagctaagccc

SEQ ID NO: 8946 - DNA, 21 bp, Homo sapiens
tttataaaagyttcgtgatct

SEQ ID NO: 8947 - DNA, 21 bp, Homo sapiens
tcaggagatgsgtgtttcatc

SEQ ID NO: 8948 - DNA, 21 bp, Homo sapiens
tttaattttaygctggaataa

SEQ ID NO: 8949 - DNA, 21 bp, Homo sapiens
ttgggaaaagygtcatttata

SEQ ID NO: 8950 - DNA, 21 bp, Homo sapiens
ctaacatcacktcaaaatata

SEQ ID NO: 8951 - DNA, 21 bp, Homo sapiens
acaccgaggcyttggtgtcct

SEQ ID NO: 8952 - DNA, 21 bp, Homo sapiens
aaaccgaatgsattgcacaca

SEQ ID NO: 8953 - DNA, 21 bp, Homo sapiens
agaacacaacygcagcagcat

SEQ ID NO: 8954 - DNA, 21 bp, Homo sapiens
caaatttattyaggaaaaact

SEQ ID NO: 8955 - DNA, 21 bp, Homo sapiens
tcaccccagamttataagtat

SEQ ID NO: 8956 - DNA, 21 bp, Homo sapiens
agataaattayggtaagaaca

SEQ ID NO: 8957 - DNA, 21 bp, Homo sapiens
gaaagcctcastcaatatagg

SEQ ID NO: 8958 - DNA, 21 bp, Homo sapiens
cagtgacgtcrgcagccatta

SEQ ID NO: 8959 - DNA, 21 bp, Homo sapiens
caagcaaaagyttactgcaat

SEQ ID NO: 8960 - DNA, 21 bp, Homo sapiens
gtgtctctggmaggaggaggg

SEQ ID NO: 8961 - DNA, 21 bp, Homo sapiens
cagtgaccaayccatgaatat

SEQ ID NO: 8962 - DNA, 21 bp, Homo sapiens
agctgattatygtaaaggggg

SEQ ID NO: 8963 - DNA, 21 bp, Homo sapiens
tgctttaaaawggcttgaaat

SEQ ID NO: 8964 - DNA, 21 bp, Homo sapiens
agaaaaaaaayggcactgaat

SEQ ID NO: 8965 - DNA, 21 bp, Homo sapiens
cccacttcagytggagcccct

SEQ ID NO: 8966 - DNA, 21 bp, Homo sapiens
ttcataaggartattcatcca

SEQ ID NO: 8967 - DNA, 21 bp, Homo sapiens
tttgtccagcscagtctgaag

SEQ ID NO: 8968 - DNA, 21 bp, Homo sapiens
aaaaaaagtgyatgtgcattc

SEQ ID NO: 8969 - DNA, 21 bp, Homo sapiens
tgatgacagtyatgggaaagc

SEQ ID NO: 8970 - DNA, 21 bp, Homo sapiens
acagcaaatcyctgtagctat

SEQ ID NO: 8971 - DNA, 21 bp, Homo sapiens
cattgcagagyggggagacag

SEQ ID NO: 8972 - DNA, 21 bp, Homo sapiens
tggcatcgtaraattgtctct

SEQ ID NO: 8973 - DNA, 21 bp, Homo sapiens
tgattgttagratttatctgt

SEQ ID NO: 8974 - DNA, 21 bp, Homo sapiens
tctataaccawctttaatcat

SEQ ID NO: 8975 - DNA, 21 bp, Homo sapiens
catagtcaaayacctgagatg

SEQ ID NO: 8976 - DNA, 21 bp, Homo sapiens
aaaaaaaacgytaccagatga

SEQ ID NO: 8977 - DNA, 21 bp, Homo sapiens
ggcttaggccrtggggcctac

SEQ ID NO: 8978 - DNA, 21 bp, Homo sapiens
aacttcaaatrttatttccac

SEQ ID NO: 8979 - DNA, 21 bp, Homo sapiens
gctagctcctycttccctcta

SEQ ID NO: 8980 - DNA, 21 bp, Homo sapiens
ctacagagtcyctgctgctgt

SEQ ID NO: 8981 - DNA, 21 bp, Homo sapiens
atccacttcastctcttttcc

SEQ ID NO: 8982 - DNA, 21 bp, Homo sapiens
tcacttactargtttttttga

SEQ ID NO: 8983 - DNA, 21 bp, Homo sapiens
agtcttcatcraaaacaatgc

SEQ ID NO: 8984 - DNA, 21 bp, Homo sapiens
gcagaaccatwtcatcagctc

SEQ ID NO: 8985 - DNA, 21 bp, Homo sapiens
cagtacttaarttgcacaccc

SEQ ID NO: 8986 - DNA, 21 bp, Homo sapiens
cacaacaaatyatgattatat

SEQ ID NO: 8987 - DNA, 21 bp, Homo sapiens
tcaagttatcrttctttgatc

SEQ ID NO: 8988 - DNA, 21 bp, Homo sapiens
agtaaaacaayggacacatga

SEQ ID NO: 8989 - DNA, 21 bp, Homo sapiens
agtttgtgcgmttattctgtt

SEQ ID NO: 8990 - DNA, 21 bp, Homo sapiens
atctataaatyatcagtgttt

SEQ ID NO: 8991 - DNA, 21 bp, Homo sapiens
aaatcagcaarattgtatagt

SEQ ID NO: 8992 - DNA, 21 bp, Homo sapiens
aataacgttgscaaagtctat

SEQ ID NO: 8993 - DNA, 21 bp, Homo sapiens
tcattgcaggktgtgctcaca

SEQ ID NO: 8994 - DNA, 21 bp, Homo sapiens
catgtattgakttcatcacag

SEQ ID NO: 8995 - DNA, 21 bp, Homo sapiens
catagtattcygccatgtaga

SEQ ID NO: 8996 - DNA, 21 bp, Homo sapiens
gaataatgatrttaaaacaac

SEQ ID NO: 8997 - DNA, 21 bp, Homo sapiens
gaaaacagtgracatttctga

SEQ ID NO: 8998 - DNA, 21 bp, Homo sapiens
aatcccatggwtctagaaatt

SEQ ID NO: 8999 - DNA, 21 bp, Homo sapiens
aaataaagggkttactctgtt

SEQ ID NO: 9000 - DNA, 21 bp, Homo sapiens
aaagaactcaraccccatgga

SEQ ID NO: 9001 - DNA, 21 bp, Homo sapiens
caccaaaatartatttattgg

SEQ ID NO: 9002 - DNA, 21 bp, Homo sapiens
gagaaaggtgwctcacaaggg

SEQ ID NO: 9003 - DNA, 21 bp, Homo sapiens
tatggatagtsataagcaagc

SEQ ID NO: 9004 - DNA, 21 bp, Homo sapiens
ccttttgcacygatcctctca

SEQ ID NO: 9005 - DNA, 21 bp, Homo sapiens
actgactaacrtaactgctgc

SEQ ID NO: 9006 - DNA, 21 bp, Homo sapiens
ttggccaaagsctgccttgta

SEQ ID NO: 9007 - DNA, 21 bp, Homo sapiens
ctgccacctayagcctctaat

SEQ ID NO: 9008 - DNA, 21 bp, Homo sapiens
aaacaataccyggcttataag

SEQ ID NO: 9009 - DNA, 21 bp, Homo sapiens
cttaaactatrccacttcaac

SEQ ID NO: 9010 - DNA, 21 bp, Homo sapiens
agaaaccttaycttcccaaga

SEQ ID NO: 9011 - DNA, 21 bp, Homo sapiens
ttccccaacaytgatagagaa

SEQ ID NO: 9012 - DNA, 21 bp, Homo sapiens
caacaaggtcrttcttttttg

SEQ ID NO: 9013 - DNA, 21 bp, Homo sapiens
cagctatcctsaacagctgat

SEQ ID NO: 9014 - DNA, 21 bp, Homo sapiens
gaattacctgrgcttttctta

SEQ ID NO: 9015 - DNA, 21 bp, Homo sapiens
atgtgtaattwccccagtaca

SEQ ID NO: 9016 - DNA, 21 bp, Homo sapiens
caatctaccayaccacctcca

SEQ ID NO: 9017 - DNA, 21 bp, Homo sapiens
ggctcacttcycagagtaagg

SEQ ID NO: 9018 - DNA, 21 bp, Homo sapiens
catcaatacayagcagaattt

SEQ ID NO: 9019 - DNA, 21 bp, Homo sapiens
aggcagattargggtatccca

SEQ ID NO: 9020 - DNA, 21 bp, Homo sapiens
ttcaagaaagrctacagctct

SEQ ID NO: 9021 - DNA, 21 bp, Homo sapiens
acttcccttcyttcagcctct

SEQ ID NO: 9022 - DNA, 21 bp, Homo sapiens
tgactcaaagrgccaaacact

SEQ ID NO: 9023 - DNA, 21 bp, Homo sapiens
ttccacactcygaatggagac

SEQ ID NO: 9024 - DNA, 21 bp, Homo sapiens
gatcaaagcaygaagaaaaga

SEQ ID NO: 9025 - DNA, 21 bp, Homo sapiens
actaagcaatragaagaccaa

SEQ ID NO: 9026 - DNA, 21 bp, Homo sapiens
tcataagcackgcatatttag

SEQ ID NO: 9027 - DNA, 21 bp, Homo sapiens
ctcagatttayttagattttc

SEQ ID NO: 9028 - DNA, 21 bp, Homo sapiens
taaaataaacytttattatgt

SEQ ID NO: 9029 - DNA, 21 bp, Homo sapiens
acagagcaccmagcaggctat

SEQ ID NO: 9030 - DNA, 21 bp, Homo sapiens
tttcttatccrctggattagg

SEQ ID NO: 9031 - DNA, 21 bp, Homo sapiens
tccaacaagaycttcttcaac

SEQ ID NO: 9032 - DNA, 21 bp, Homo sapiens
ccttttaatawactcaatgtg

SEQ ID NO: 9033 - DNA, 21 bp, Homo sapiens
cccaatcataygggattatca

SEQ ID NO: 9034 - DNA, 21 bp, Homo sapiens
atgcttggcaygtacttttca

SEQ ID NO: 9035 - DNA, 21 bp, Homo sapiens
gattccctgcmaaaccaaact

SEQ ID NO: 9036 - DNA, 21 bp, Homo sapiens
gctaaagtcawggagcaactc

SEQ ID NO: 9037 - DNA, 21 bp, Homo sapiens
gcattcttagrtacttcaatt

SEQ ID NO: 9038 - DNA, 21 bp, Homo sapiens
agctgtgcccrcccagagttc

SEQ ID NO: 9039 - DNA, 21 bp, Homo sapiens
taacttttggkttcactcttt

SEQ ID NO: 9040 - DNA, 21 bp, Homo sapiens
gaatttctgargcacaacttt

SEQ ID NO: 9041 - DNA, 21 bp, Homo sapiens
aaagtcatgtracttcctctt

SEQ ID NO: 9042 - DNA, 21 bp, Homo sapiens
caaggtctccrtaacccccca

SEQ ID NO: 9043 - DNA, 21 bp, Homo sapiens
ccactgtgctkaaccattaga

SEQ ID NO: 9044 - DNA, 21 bp, Homo sapiens
aaatccacttkcaaatcaaat

SEQ ID NO: 9045 - DNA, 21 bp, Homo sapiens
gttctttggartataatatgg

SEQ ID NO: 9046 - DNA, 21 bp, Homo sapiens
ttcctgacaaygctatttgca

SEQ ID NO: 9047 - DNA, 21 bp, Homo sapiens
gtttgtgtcartattaagcca

SEQ ID NO: 9048 - DNA, 21 bp, Homo sapiens
ataaagtgacygagctgagat

SEQ ID NO: 9049 - DNA, 21 bp, Homo sapiens
gtttagcctaygaattgacaa

SEQ ID NO: 9050 - DNA, 21 bp, Homo sapiens
cttaggttctyaggcttttgg

SEQ ID NO: 9051 - DNA, 21 bp, Homo sapiens
agaaagtgaamaggcacccca

SEQ ID NO: 9052 - DNA, 21 bp, Homo sapiens
tccaccacaaytcttgagctt

SEQ ID NO: 9053 - DNA, 21 bp, Homo sapiens
atttcttattycttgtctgtt

SEQ ID NO: 9054 - DNA, 21 bp, Homo sapiens
aattcttgctrtgatacatcc

SEQ ID NO: 9055 - DNA, 21 bp, Homo sapiens
gaaaaaattaygcaaaaagga

SEQ ID NO: 9056 - DNA, 21 bp, Homo sapiens
aaatgcaatgkctctggtggt

SEQ ID NO: 9057 - DNA, 21 bp, Homo sapiens
ttattgttaaygtgtttgttc

SEQ ID NO: 9058 - DNA, 21 bp, Homo sapiens
gaaagataagmgagtttgggc

SEQ ID NO: 9059 - DNA, 21 bp, Homo sapiens
gaatgaagagyaccagaaatg

SEQ ID NO: 9060 - DNA, 21 bp, Homo sapiens
aataacgagaraccatccaga

SEQ ID NO: 9061 - DNA, 21 bp, Homo sapiens
ggaagaacacrgtcacaaaaa

SEQ ID NO: 9062 - DNA, 21 bp, Homo sapiens
catatcagttmacattcccag

SEQ ID NO: 9063 - DNA, 21 bp, Homo sapiens
tgttcaatgaytttgctaatt

SEQ ID NO: 9064 - DNA, 21 bp, Homo sapiens
catgtgaatcmataagcaaga

SEQ ID NO: 9065 - DNA, 21 bp, Homo sapiens
ctcgagatgamagggactgaa

SEQ ID NO: 9066 - DNA, 21 bp, Homo sapiens
cagacgagaayttcggacaga

SEQ ID NO: 9067 - DNA, 21 bp, Homo sapiens
gcaacttttaycactgctaaa

SEQ ID NO: 9068 - DNA, 21 bp, Homo sapiens
tttttttaatytttcaatgaa

SEQ ID NO: 9069 - DNA, 21 bp, Homo sapiens
gcaatagattsctggaagttc

SEQ ID NO: 9070 - DNA, 21 bp, Homo sapiens
cccgtccctgrtgcctgggct

SEQ ID NO: 9071 - DNA, 21 bp, Homo sapiens
attcccagacyaaggacatga

SEQ ID NO: 9072 - DNA, 21 bp, Homo sapiens
gggcaagtcarttaatctcct

SEQ ID NO: 9073 - DNA, 21 bp, Homo sapiens
gatcctctcayggcaaattcc

SEQ ID NO: 9074 - DNA, 21 bp, Homo sapiens
tattaaagaakctagaagctc

SEQ ID NO: 9075 - DNA, 21 bp, Homo sapiens
ttttgttaaayatgtgcttta

SEQ ID NO: 9076 - DNA, 21 bp, Homo sapiens
ttttttctttygccaagatga

SEQ ID NO: 9077 - DNA, 21 bp, Homo sapiens
ggaggtgatgygagacaataa

SEQ ID NO: 9078 - DNA, 21 bp, Homo sapiens
tgatccatgcycttgccctag

SEQ ID NO: 9079 - DNA, 21 bp, Homo sapiens
ttctacaattyggcagattgg

SEQ ID NO: 9080 - DNA, 21 bp, Homo sapiens
aaattggtttstaactgctgt

SEQ ID NO: 9081 - DNA, 21 bp, Homo sapiens
tttttcattgwcttgctcaac

SEQ ID NO: 9082 - DNA, 21 bp, Homo sapiens
gtttggaacarccacccaagg

SEQ ID NO: 9083 - DNA, 21 bp, Homo sapiens
gcacagcgcgyttacaagtaa

SEQ ID NO: 9084 - DNA, 21 bp, Homo sapiens
cctttcaatgrtgagtgatgc

SEQ ID NO: 9085 - DNA, 21 bp, Homo sapiens
tcactgacaayaggtttgaac

SEQ ID NO: 9086 - DNA, 21 bp, Homo sapiens
atgagttaatrgtaatgaaaa

SEQ ID NO: 9087 - DNA, 21 bp, Homo sapiens
atgatgacaaygaggggttga

SEQ ID NO: 9088 - DNA, 21 bp, Homo sapiens
gtaagctaccytaaatatcac

SEQ ID NO: 9089 - DNA, 21 bp, Homo sapiens
aagcccaccaragttagactc

SEQ ID NO: 9090 - DNA, 21 bp, Homo sapiens
attggagataytctcagaact

SEQ ID NO: 9091 - DNA, 21 bp, Homo sapiens
atttacttttyccaaaatgtg

SEQ ID NO: 9092 - DNA, 21 bp, Homo sapiens
actaacgatgyatactgctgt

SEQ ID NO: 9093 - DNA, 21 bp, Homo sapiens
tttaaagatgmaacactcata

SEQ ID NO: 9094 - DNA, 21 bp, Homo sapiens
gctcctacccmactgcctcgg

SEQ ID NO: 9095 - DNA, 21 bp, Homo sapiens
cccttcctccytaactggtgg

SEQ ID NO: 9096 - DNA, 21 bp, Homo sapiens
taccagttcartcactacatc

SEQ ID NO: 9097 - DNA, 21 bp, Homo sapiens
tcatttgcttrattatccagt

SEQ ID NO: 9098 - DNA, 21 bp, Homo sapiens
tcaatatttartgatgtgtga

SEQ ID NO: 9099 - DNA, 21 bp, Homo sapiens
aggaaaggtgmattattaagc

SEQ ID NO: 9100 - DNA, 21 bp, Homo sapiens
taattgattgrcttcttacag

SEQ ID NO: 9101 - DNA, 21 bp, Homo sapiens
ttcaaaagggrtaattacagg

SEQ ID NO: 9102 - DNA, 21 bp, Homo sapiens
tttcagagccractgctgggt

SEQ ID NO: 9103 - DNA, 21 bp, Homo sapiens
tgccaatgacractggctgct

SEQ ID NO: 9104 - DNA, 21 bp, Homo sapiens
cagaaagagakaaactaagcc

SEQ ID NO: 9105 - DNA, 21 bp, Homo sapiens
ataacaatggycacttcccac

SEQ ID NO: 9106 - DNA, 21 bp, Homo sapiens
gaggtatccarttaagtttct

SEQ ID NO: 9107 - DNA, 21 bp, Homo sapiens
tgttatagctytgcttaaatc

SEQ ID NO: 9108 - DNA, 21 bp, Homo sapiens
ggaactgaggwtttttactga

SEQ ID NO: 9109 - DNA, 21 bp, Homo sapiens
acattagccartagcacctca

SEQ ID NO: 9110 - DNA, 21 bp, Homo sapiens
tgacatttcamggagtcagaa

SEQ ID NO: 9111 - DNA, 21 bp, Homo sapiens
ggaagggaaakgaatggaact

SEQ ID NO: 9112 - DNA, 21 bp, Homo sapiens
aaaggtcacayactatgagtg

SEQ ID NO: 9113 - DNA, 21 bp, Homo sapiens
cttggaaaackctctaacaca

SEQ ID NO: 9114 - DNA, 21 bp, Homo sapiens
ttccaatttakgagtcaaaac

SEQ ID NO: 9115 - DNA, 21 bp, Homo sapiens
gttctggttcratccataaaa

SEQ ID NO: 9116 - DNA, 21 bp, Homo sapiens
ttattttattkttgtaaaccc

SEQ ID NO: 9117 - DNA, 21 bp, Homo sapiens
gaaaaattgtsgtatgacagg

SEQ ID NO: 9118 - DNA, 21 bp, Homo sapiens
ttgaaggttgmgcactccagg

SEQ ID NO: 9119 - DNA, 21 bp, Homo sapiens
tatcaggatgsaatatctact

SEQ ID NO: 9120 - DNA, 21 bp, Homo sapiens
ttattcatttrtttttaaaat

SEQ ID NO: 9121 - DNA, 21 bp, Homo sapiens
acagaaaataytcatgttctt

SEQ ID NO: 9122 - DNA, 21 bp, Homo sapiens
gttcattcaayagattttttt

SEQ ID NO: 9123 - DNA, 21 bp, Homo sapiens
catgacttaaytaatttccaa

SEQ ID NO: 9124 - DNA, 21 bp, Homo sapiens
atgtgtggtamgactgcagct

SEQ ID NO: 9125 - DNA, 21 bp, Homo sapiens
ctattctagcygaagtctgtc

SEQ ID NO: 9126 - DNA, 21 bp, Homo sapiens
accagataacyagatataagt

SEQ ID NO: 9127 - DNA, 21 bp, Homo sapiens
ctagagctcaygcaagcagga

SEQ ID NO: 9128 - DNA, 21 bp, Homo sapiens
aatcaacttgragttctacta

SEQ ID NO: 9129 - DNA, 21 bp, Homo sapiens
atttctcctgsaacaaactat

SEQ ID NO: 9130 - DNA, 21 bp, Homo sapiens
accgtataggmttcttggcaa

SEQ ID NO: 9131 - DNA, 21 bp, Homo sapiens
tggagtaatayagtagtttga

SEQ ID NO: 9132 - DNA, 21 bp, Homo sapiens
caacattgcayaggacagtac

SEQ ID NO: 9133 - DNA, 21 bp, Homo sapiens
aaatattcaaygtctacatta

SEQ ID NO: 9134 - DNA, 21 bp, Homo sapiens
aaactctcacyggatgctttt

SEQ ID NO: 9135 - DNA, 21 bp, Homo sapiens
atggcttggakctgtgtccca

SEQ ID NO: 9136 - DNA, 21 bp, Homo sapiens
ccagttcacawattgaagggc

SEQ ID NO: 9137 - DNA, 21 bp, Homo sapiens
gaagggatacyggaaaatata

SEQ ID NO: 9138 - DNA, 21 bp, Homo sapiens
ttaccgttggrcttatcatcc

SEQ ID NO: 9139 - DNA, 21 bp, Homo sapiens
acagaacccaytgggctttta

SEQ ID NO: 9140 - DNA, 21 bp, Homo sapiens
ataaatctatmctctttggct

SEQ ID NO: 9141 - DNA, 21 bp, Homo sapiens
ctagaacagcrcaaccgtata

SEQ ID NO: 9142 - DNA, 21 bp, Homo sapiens
tgttgtaccasgaatcacaag

SEQ ID NO: 9143 - DNA, 21 bp, Homo sapiens
tacttcatttygacaaacaag

SEQ ID NO: 9144 - DNA, 21 bp, Homo sapiens
gattattatgygacaatccct

SEQ ID NO: 9145 - DNA, 21 bp, Homo sapiens
ctttattctayacaatatctg

SEQ ID NO: 9146 - DNA, 21 bp, Homo sapiens
aatacactctmcactataaca

SEQ ID NO: 9147 - DNA, 21 bp, Homo sapiens
aagggtcactrtgataaaaca

SEQ ID NO: 9148 - DNA, 21 bp, Homo sapiens
attcagaatcraactgtttta

SEQ ID NO: 9149 - DNA, 21 bp, Homo sapiens
gtattaagacwtcaattcact

SEQ ID NO: 9150 - DNA, 21 bp, Homo sapiens
tctgcttgtasatagtccttt

SEQ ID NO: 9151 - DNA, 21 bp, Homo sapiens
ttttatttaamcttattgaaa

SEQ ID NO: 9152 - DNA, 21 bp, Homo sapiens
acacttatgaratagtcatcc

SEQ ID NO: 9153 - DNA, 21 bp, Homo sapiens
cttattcattrcaaatgaata

SEQ ID NO: 9154 - DNA, 21 bp, Homo sapiens
ctatgacacaygtgagggtca

SEQ ID NO: 9155 - DNA, 21 bp, Homo sapiens
tctgtcatggwggagggtggg

SEQ ID NO: 9156 - DNA, 21 bp, Homo sapiens
cagatatcctraaccactcag

SEQ ID NO: 9157 - DNA, 21 bp, Homo sapiens
acactggggcyttattaatgc

SEQ ID NO: 9158 - DNA, 21 bp, Homo sapiens
gtttcagaagkttaatttgta

SEQ ID NO: 9159 - DNA, 21 bp, Homo sapiens
actagtgtgakaactcagtgt

SEQ ID NO: 9160 - DNA, 21 bp, Homo sapiens
ctcctccaaayctccaaactg

SEQ ID NO: 9161 - DNA, 21 bp, Homo sapiens
aaaagagaccrgtttttattc

SEQ ID NO: 9162 - DNA, 21 bp, Homo sapiens
tttgacccatycccattagta

SEQ ID NO: 9163 - DNA, 21 bp, Homo sapiens
tttaaaagaayagaaaacagg

SEQ ID NO: 9164 - DNA, 21 bp, Homo sapiens
tagcttcctckagaccctttt

SEQ ID NO: 9165 - DNA, 21 bp, Homo sapiens
tcagaaatgtytggtaaggca

SEQ ID NO: 9166 - DNA, 21 bp, Homo sapiens
atgttgatgtwtgggatgtca

SEQ ID NO: 9167 - DNA, 21 bp, Homo sapiens
catgttttcayttactcacac

SEQ ID NO: 9168 - DNA, 21 bp, Homo sapiens
gaaacagttgkaattaataaa

SEQ ID NO: 9169 - DNA, 21 bp, Homo sapiens
ctaaagccatrcttatgaaaa

SEQ ID NO: 9170 - DNA, 21 bp, Homo sapiens
tttaaaagaarcaatatgatt

SEQ ID NO: 9171 - DNA, 21 bp, Homo sapiens
gaaaaaccctsgtttaaaaat

SEQ ID NO: 9172 - DNA, 21 bp, Homo sapiens
gaagagcaggraatggtgctt

SEQ ID NO: 9173 - DNA, 21 bp, Homo sapiens
ctgtaggtttytaaattaata

SEQ ID NO: 9174 - DNA, 21 bp, Homo sapiens
ttatatagaaytgtgtatatt

SEQ ID NO: 9175 - DNA, 21 bp, Homo sapiens
acaaatgtttygtaggcaaat

SEQ ID NO: 9176 - DNA, 21 bp, Homo sapiens
ctaatacctgktatcagcatc

SEQ ID NO: 9177 - DNA, 21 bp, Homo sapiens
agcaatttttwaaagtataag

SEQ ID NO: 9178 - DNA, 21 bp, Homo sapiens
gtatcaaaagrattgaagcaa

SEQ ID NO: 9179 - DNA, 21 bp, Homo sapiens
gaaaataggcytgtgaagata

SEQ ID NO: 9180 - DNA, 21 bp, Homo sapiens
acaaatgagcrtggctatgtt

SEQ ID NO: 9181 - DNA, 21 bp, Homo sapiens
tagcctgatgrgtgaagaggc

SEQ ID NO: 9182 - DNA, 21 bp, Homo sapiens
gagacaacatytatattgaga

SEQ ID NO: 9183 - DNA, 21 bp, Homo sapiens
gtgctttacamgtaaatagag

SEQ ID NO: 9184 - DNA, 21 bp, Homo sapiens
aatcgtgcttwaatcaaatgt

SEQ ID NO: 9185 - DNA, 21 bp, Homo sapiens
aggttgacccygaaattgctc

SEQ ID NO: 9186 - DNA, 21 bp, Homo sapiens
cctacaattaytaatgttaca

SEQ ID NO: 9187 - DNA, 21 bp, Homo sapiens
gctgtgcaggkcagggggacc

SEQ ID NO: 9188 - DNA, 21 bp, Homo sapiens
aggtgatcatsagatgatagt

SEQ ID NO: 9189 - DNA, 21 bp, Homo sapiens
tgaggaaacayggattacagc

SEQ ID NO: 9190 - DNA, 21 bp, Homo sapiens
caaccccacakagacaatttc

SEQ ID NO: 9191 - DNA, 21 bp, Homo sapiens
gaatgttgttsaaggtcaagg

SEQ ID NO: 9192 - DNA, 21 bp, Homo sapiens
ctacagcccaytgttcaaaac

SEQ ID NO: 9193 - DNA, 21 bp, Homo sapiens
cacaggagacycaccgagctt

SEQ ID NO: 9194 - DNA, 21 bp, Homo sapiens
cagtattactrtatttgaaga

SEQ ID NO: 9195 - DNA, 21 bp, Homo sapiens
aaagagaaaarggtacagggt

SEQ ID NO: 9196 - DNA, 21 bp, Homo sapiens
gaatataattycaagtattct

SEQ ID NO: 9197 - DNA, 21 bp, Homo sapiens
agatttgctcrttcatttcag

SEQ ID NO: 9198 - DNA, 21 bp, Homo sapiens
aaagggctttytttaaagaaa

SEQ ID NO: 9199 - DNA, 21 bp, Homo sapiens
attttttcaarccttttatgt

SEQ ID NO: 9200 - DNA, 21 bp, Homo sapiens
ctaagctttgkttccctcatc

SEQ ID NO: 9201 - DNA, 21 bp, Homo sapiens
tctcataaaasaagtatgtgt

SEQ ID NO: 9202 - DNA, 21 bp, Homo sapiens
catttggcccrcatcacattg

SEQ ID NO: 9203 - DNA, 21 bp, Homo sapiens
ccttggaaacwtaacaaagtt

SEQ ID NO: 9204 - DNA, 21 bp, Homo sapiens
actgactactrtataactaca

SEQ ID NO: 9205 - DNA, 21 bp, Homo sapiens
ctccctcctcyttcactccca

SEQ ID NO: 9206 - DNA, 21 bp, Homo sapiens
ttgaaaaaaamtggcatgtgc

SEQ ID NO: 9207 - DNA, 21 bp, Homo sapiens
ttgggtaaaastcaatgctgg

SEQ ID NO: 9208 - DNA, 21 bp, Homo sapiens
gctatatagargagagaatcg

SEQ ID NO: 9209 - DNA, 21 bp, Homo sapiens
aattttgaagrttaatggagt

SEQ ID NO: 9210 - DNA, 21 bp, Homo sapiens
aaagtttcctkacttttagtt

SEQ ID NO: 9211 - DNA, 21 bp, Homo sapiens
aaacccaacaytgccagcaag

SEQ ID NO: 9212 - DNA, 21 bp, Homo sapiens
aagtacattgytttgggtgaa

SEQ ID NO: 9213 - DNA, 21 bp, Homo sapiens
tcagtcataascatgcagtta

SEQ ID NO: 9214 - DNA, 21 bp, Homo sapiens
atttaaaaatwcgtatctgat

SEQ ID NO: 9215 - DNA, 21 bp, Homo sapiens
gttactagcaygtcaatgacc

SEQ ID NO: 9216 - DNA, 21 bp, Homo sapiens
aggaaagtaarggatgctggg

SEQ ID NO: 9217 - DNA, 21 bp, Homo sapiens
atttcattaartaagaactta

SEQ ID NO: 9218 - DNA, 21 bp, Homo sapiens
gatcatagagracatggacat

SEQ ID NO: 9219 - DNA, 21 bp, Homo sapiens
tttttaactgyagacaggatt

SEQ ID NO: 9220 - DNA, 21 bp, Homo sapiens
ttggacttctscaaacacaac

SEQ ID NO: 9221 - DNA, 21 bp, Homo sapiens
agggcacagaycctggggcca

SEQ ID NO: 9222 - DNA, 21 bp, Homo sapiens
atgagagaaastgcaaataca

SEQ ID NO: 9223 - DNA, 21 bp, Homo sapiens
ataacgtgtasagaaaaatct

SEQ ID NO: 9224 - DNA, 21 bp, Homo sapiens
ggaactgaatragctgtgtgg

SEQ ID NO: 9225 - DNA, 21 bp, Homo sapiens
tcacatgaagwtgtgggcttg

SEQ ID NO: 9226 - DNA, 21 bp, Homo sapiens
ctcctctgttstgtggtggct

SEQ ID NO: 9227 - DNA, 21 bp, Homo sapiens
aactaggagcracctatcttg

SEQ ID NO: 9228 - DNA, 21 bp, Homo sapiens
gctaggactaygctcccaaat

SEQ ID NO: 9229 - DNA, 21 bp, Homo sapiens
aacccttgggycttaaatcct

SEQ ID NO: 9230 - DNA, 21 bp, Homo sapiens
ttacaaccccratttaaagaa

SEQ ID NO: 9231 - DNA, 21 bp, Homo sapiens
atcatgtagcrataacctgtt

SEQ ID NO: 9232 - DNA, 21 bp, Homo sapiens
tcctaaggaaygaggagtaat

SEQ ID NO: 9233 - DNA, 21 bp, Homo sapiens
actgctgcccrtaactggtaa

SEQ ID NO: 9234 - DNA, 21 bp, Homo sapiens
tccagccaggygcgacaggac

SEQ ID NO: 9235 - DNA, 21 bp, Homo sapiens
caaataatttrttttgtattt

SEQ ID NO: 9236 - DNA, 21 bp, Homo sapiens
gctttgcgtcytgaccagtgt

SEQ ID NO: 9237 - DNA, 21 bp, Homo sapiens
gatatgagtcygtcacatgaa

SEQ ID NO: 9238 - DNA, 21 bp, Homo sapiens
ttctgattggrgcacttttaa

SEQ ID NO: 9239 - DNA, 21 bp, Homo sapiens
tcatgtctcascttattagca

SEQ ID NO: 9240 - DNA, 21 bp, Homo sapiens
ctcccagtagstctccaaata

SEQ ID NO: 9241 - DNA, 21 bp, Homo sapiens
tgtcacagtakactgaaagct

SEQ ID NO: 9242 - DNA, 21 bp, Homo sapiens
ctcttgaaacktagagctgag

SEQ ID NO: 9243 - DNA, 21 bp, Homo sapiens
attgctctatkaaaataaggg

SEQ ID NO: 9244 - DNA, 21 bp, Homo sapiens
gaatgatgcastccctcccca

SEQ ID NO: 9245 - DNA, 21 bp, Homo sapiens
cccaagcaagrttctgtttct

SEQ ID NO: 9246 - DNA, 21 bp, Homo sapiens
acatttgaccraaagaccaca

SEQ ID NO: 9247 - DNA, 21 bp, Homo sapiens
ctggccctcaygacttttaat

SEQ ID NO: 9248 - DNA, 21 bp, Homo sapiens
tagaaaaatgygttctgactg

SEQ ID NO: 9249 - DNA, 21 bp, Homo sapiens
ctgacctcggyaggagtagac

SEQ ID NO: 9250 - DNA, 21 bp, Homo sapiens
agtataaactygtgcataaat

SEQ ID NO: 9251 - DNA, 21 bp, Homo sapiens
gacaccccgtkcttggctcac

SEQ ID NO: 9252 - DNA, 21 bp, Homo sapiens
tgagaacatgsaaatgaattg

SEQ ID NO: 9253 - DNA, 21 bp, Homo sapiens
ttataaggggwaacattatta

SEQ ID NO: 9254 - DNA, 21 bp, Homo sapiens
acctcctggaraatagatgct

SEQ ID NO: 9255 - DNA, 21 bp, Homo sapiens
ttccctctagragatacagtt

SEQ ID NO: 9256 - DNA, 21 bp, Homo sapiens
agtggccaaamcctaccaagt

SEQ ID NO: 9257 - DNA, 21 bp, Homo sapiens
atactttatayatggatagat

SEQ ID NO: 9258 - DNA, 21 bp, Homo sapiens
tcataaactcrccccacaact

SEQ ID NO: 9259 - DNA, 21 bp, Homo sapiens
ggacaggagtraaagacagat

SEQ ID NO: 9260 - DNA, 21 bp, Homo sapiens
caggaagttgsacttttacct

SEQ ID NO: 9261 - DNA, 21 bp, Homo sapiens
aaagggtctcmgctgtttagg

SEQ ID NO: 9262 - DNA, 21 bp, Homo sapiens
gatctgaaaamccaaaggcaa

SEQ ID NO: 9263 - DNA, 21 bp, Homo sapiens
ttcccgttgcstgggctcgta

SEQ ID NO: 9264 - DNA, 21 bp, Homo sapiens
tcaagttaaamctggtgtgta

SEQ ID NO: 9265 - DNA, 21 bp, Homo sapiens
ctatgcccagsagaaccctag

SEQ ID NO: 9266 - DNA, 21 bp, Homo sapiens
gtatgggcacrtggctggtga

SEQ ID NO: 9267 - DNA, 21 bp, Homo sapiens
tctccaagagygggcaggaac

SEQ ID NO: 9268 - DNA, 21 bp, Homo sapiens
atcccatctcrtccatcctac

SEQ ID NO: 9269 - DNA, 21 bp, Homo sapiens
gtgttgtgagragaagaccag

SEQ ID NO: 9270 - DNA, 21 bp, Homo sapiens
attcaagaaamctactgccgg

SEQ ID NO: 9271 - DNA, 21 bp, Homo sapiens
cttttaaaggwgacattgcta

SEQ ID NO: 9272 - DNA, 21 bp, Homo sapiens
tcctgggaatrcttggctctg

SEQ ID NO: 9273 - DNA, 21 bp, Homo sapiens
aagagactctsataaaaatgg

SEQ ID NO: 9274 - DNA, 21 bp, Homo sapiens
tgcattcttgkctagcgctga

SEQ ID NO: 9275 - DNA, 21 bp, Homo sapiens
ttgctacagawctttccacct

SEQ ID NO: 9276 - DNA, 21 bp, Homo sapiens
gaagttcttaytgtccatcta

SEQ ID NO: 9277 - DNA, 21 bp, Homo sapiens
ggttctgaaayaagagttggc

SEQ ID NO: 9278 - DNA, 21 bp, Homo sapiens
acagtgatgayacctacctgc

SEQ ID NO: 9279 - DNA, 21 bp, Homo sapiens
ttcaagaactrtttcaaatat

SEQ ID NO: 9280 - DNA, 21 bp, Homo sapiens
ttagttttctyatgaggcaac

SEQ ID NO: 9281 - DNA, 21 bp, Homo sapiens
agaacacttgraactctgatg

SEQ ID NO: 9282 - DNA, 21 bp, Homo sapiens
tgcgaatggcygtttgcccag

SEQ ID NO: 9283 - DNA, 21 bp, Homo sapiens
ccattaactamctacacaaac

SEQ ID NO: 9284 - DNA, 21 bp, Homo sapiens
accaatcaaasgccaatagaa

SEQ ID NO: 9285 - DNA, 21 bp, Homo sapiens
caaaggccaayagaatacatt

SEQ ID NO: 9286 - DNA, 21 bp, Homo sapiens
tgctaatcaaytccctgggct

SEQ ID NO: 9287 - DNA, 21 bp, Homo sapiens
cagtcatcatygctgattttc

SEQ ID NO: 9288 - DNA, 21 bp, Homo sapiens
gtgtgaagcaragaggttgtg

SEQ ID NO: 9289 - DNA, 21 bp, Homo sapiens
attttgagctsagtcagcact

SEQ ID NO: 9290 - DNA, 21 bp, Homo sapiens
agtagataagygtcccatggt

SEQ ID NO: 9291 - DNA, 21 bp, Homo sapiens
gagattcagaygacttgtata

SEQ ID NO: 9292 - DNA, 21 bp, Homo sapiens
gccattcaggyagagtttcag

SEQ ID NO: 9293 - DNA, 21 bp, Homo sapiens
ggtgtctgagwgtgtgttgtt

SEQ ID NO: 9294 - DNA, 21 bp, Homo sapiens
aaatgtcaggrtgagaaagtt

SEQ ID NO: 9295 - DNA, 21 bp, Homo sapiens
aacaaatcacrctgtcaaaca

SEQ ID NO: 9296 - DNA, 21 bp, Homo sapiens
ttttatagcastattcaagcc

SEQ ID NO: 9297 - DNA, 21 bp, Homo sapiens
taagccctcaratagaaaatc

SEQ ID NO: 9298 - DNA, 21 bp, Homo sapiens
acattttgcawtagaaactca

SEQ ID NO: 9299 - DNA, 21 bp, Homo sapiens
gacctcaactyattgtatctt

SEQ ID NO: 9300 - DNA, 21 bp, Homo sapiens
agcgctcatartagtccatta

SEQ ID NO: 9301 - DNA, 21 bp, Homo sapiens
cagtcttctgyatttataagg

SEQ ID NO: 9302 - DNA, 21 bp, Homo sapiens
cctccctcacrcgatgtatcc

SEQ ID NO: 9303 - DNA, 21 bp, Homo sapiens
gattcagaccytcaaacatag

SEQ ID NO: 9304 - DNA, 21 bp, Homo sapiens
caattgaagtrgaagcttgat

SEQ ID NO: 9305 - DNA, 21 bp, Homo sapiens
tttggtcaaawacacatcccc

SEQ ID NO: 9306 - DNA, 21 bp, Homo sapiens
ctaacagagayaaggccactt

SEQ ID NO: 9307 - DNA, 21 bp, Homo sapiens
gacattccctyaaggggcttt

SEQ ID NO: 9308 - DNA, 21 bp, Homo sapiens
tttgggttggygataccctag

SEQ ID NO: 9309 - DNA, 21 bp, Homo sapiens
tatcaggtggygacttaatta

SEQ ID NO: 9310 - DNA, 21 bp, Homo sapiens
ataaaattaayaagaacaaca

SEQ ID NO: 9311 - DNA, 21 bp, Homo sapiens
ctctgagcctyagtttctcta

SEQ ID NO: 9312 - DNA, 21 bp, Homo sapiens
atacctataamtgagtttacc

SEQ ID NO: 9313 - DNA, 21 bp, Homo sapiens
ctaactctaaktagtgttttc

SEQ ID NO: 9314 - DNA, 21 bp, Homo sapiens
tatataaagarctcttacaac

SEQ ID NO: 9315 - DNA, 21 bp, Homo sapiens
cacaggattawacctgaactc

SEQ ID NO: 9316 - DNA, 21 bp, Homo sapiens
gatgtaccaaytcaagatctg

SEQ ID NO: 9317 - DNA, 21 bp, Homo sapiens
aaactctccaygcccacatgg

SEQ ID NO: 9318 - DNA, 21 bp, Homo sapiens
cccaggttgtktgctgtgtca

SEQ ID NO: 9319 - DNA, 21 bp, Homo sapiens
aagctcaagcmtacatggagg

SEQ ID NO: 9320 - DNA, 21 bp, Homo sapiens
attcaaaatartaatgtaata

SEQ ID NO: 9321 - DNA, 21 bp, Homo sapiens
agttgaaaggyagaagagcag

SEQ ID NO: 9322 - DNA, 21 bp, Homo sapiens
gttatcaaagygcagatccta

SEQ ID NO: 9323 - DNA, 21 bp, Homo sapiens
ttccacatccrtggattcaac

SEQ ID NO: 9324 - DNA, 21 bp, Homo sapiens
ttcagccaagyttaatgatgt

SEQ ID NO: 9325 - DNA, 21 bp, Homo sapiens
agcaaacatgwgctttatctc

SEQ ID NO: 9326 - DNA, 21 bp, Homo sapiens
agtatgtaggwtgtgcgcact

SEQ ID NO: 9327 - DNA, 21 bp, Homo sapiens
gtaaaaagttrgagtagctgt

SEQ ID NO: 9328 - DNA, 21 bp, Homo sapiens
ccctaagtgtkttaagacttc

SEQ ID NO: 9329 - DNA, 21 bp, Homo sapiens
cttcctacagrgtttctcttc

SEQ ID NO: 9330 - DNA, 21 bp, Homo sapiens
gccagaatccyccctttcttc

SEQ ID NO: 9331 - DNA, 21 bp, Homo sapiens
aattagagacygaggctccta

SEQ ID NO: 9332 - DNA, 21 bp, Homo sapiens
gagtttccagmcttaatctaa

SEQ ID NO: 9333 - DNA, 21 bp, Homo sapiens
agacagcctgyatcccttttg

SEQ ID NO: 9334 - DNA, 21 bp, Homo sapiens
gtctcaccttsagaatcatgc

SEQ ID NO: 9335 - DNA, 21 bp, Homo sapiens
aagaacaggtrggacttgaaa

SEQ ID NO: 9336 - DNA, 21 bp, Homo sapiens
atattttaccytgtagtacct

SEQ ID NO: 9337 - DNA, 21 bp, Homo sapiens
atatagcatgwctgtataact

SEQ ID NO: 9338 - DNA, 21 bp, Homo sapiens
tgctagcaccyttccacaaac

SEQ ID NO: 9339 - DNA, 21 bp, Homo sapiens
aagtacctagyacagtatgat

SEQ ID NO: 9340 - DNA, 21 bp, Homo sapiens
attgaaggagwcttacttttc

SEQ ID NO: 9341 - DNA, 21 bp, Homo sapiens
ttcacccaatrccttttctcc

SEQ ID NO: 9342 - DNA, 21 bp, Homo sapiens
ggtactcaggycacagtgaaa

SEQ ID NO: 9343 - DNA, 21 bp, Homo sapiens
aggtgtgagcraatgagtgca

SEQ ID NO: 9344 - DNA, 21 bp, Homo sapiens
aggagtggggstgatgttccc

SEQ ID NO: 9345 - DNA, 21 bp, Homo sapiens
atacaaattgyaggcatagtg

SEQ ID NO: 9346 - DNA, 21 bp, Homo sapiens
cagttttctgrtgtgtcttat

SEQ ID NO: 9347 - DNA, 21 bp, Homo sapiens
gtgttcgtggmctggtgttca

SEQ ID NO: 9348 - DNA, 21 bp, Homo sapiens
agaagtagagwaaaaattttg

SEQ ID NO: 9349 - DNA, 21 bp, Homo sapiens
aaagctaactyggatagtgag

SEQ ID NO: 9350 - DNA, 21 bp, Homo sapiens
aaggacagtaraacttggttt

SEQ ID NO: 9351 - DNA, 21 bp, Homo sapiens
gcatgagtcartttgtaggaa

SEQ ID NO: 9352 - DNA, 21 bp, Homo sapiens
ccaggctcaasttgcatattt

SEQ ID NO: 9353 - DNA, 21 bp, Homo sapiens
tgcttttatayagaaaaagaa

SEQ ID NO: 9354 - DNA, 21 bp, Homo sapiens
ggtgtgtagcmgagtatttga

SEQ ID NO: 9355 - DNA, 21 bp, Homo sapiens
aaaagtgaatrtttgattctc

SEQ ID NO: 9356 - DNA, 21 bp, Homo sapiens
tttcaccacarttattcggta

SEQ ID NO: 9357 - DNA, 21 bp, Homo sapiens
atctgagctgkgagaggggag

SEQ ID NO: 9358 - DNA, 21 bp, Homo sapiens
attttttttcyttggcagcat

SEQ ID NO: 9359 - DNA, 21 bp, Homo sapiens
cttttcaaagytcccccaggg

SEQ ID NO: 9360 - DNA, 21 bp, Homo sapiens
aatgatgaaamgatgtacaaa

SEQ ID NO: 9361 - DNA, 21 bp, Homo sapiens
attgcagttartaccataata

SEQ ID NO: 9362 - DNA, 21 bp, Homo sapiens
ggggtggaacrtgaagaatgg

SEQ ID NO: 9363 - DNA, 21 bp, Homo sapiens
cagcacaccartgcatctgcc

SEQ ID NO: 9364 - DNA, 21 bp, Homo sapiens
aagccacagtrttctcttaca

SEQ ID NO: 9365 - DNA, 21 bp, Homo sapiens
aagtttttaartttagaagac

SEQ ID NO: 9366 - DNA, 21 bp, Homo sapiens
gtgaaacaagyttaaagttgt

SEQ ID NO: 9367 - DNA, 21 bp, Homo sapiens
aacattccctygttctttaat

SEQ ID NO: 9368 - DNA, 21 bp, Homo sapiens
atctcattctyctgagttaaa

SEQ ID NO: 9369 - DNA, 21 bp, Homo sapiens
gggcctttacrtaaattatag

SEQ ID NO: 9370 - DNA, 21 bp, Homo sapiens
gcatttgtacycagggttaaa

SEQ ID NO: 9371 - DNA, 21 bp, Homo sapiens
cttaatagcarcataggcaat

SEQ ID NO: 9372 - DNA, 21 bp, Homo sapiens
tctggttccaraccatctgta

SEQ ID NO: 9373 - DNA, 21 bp, Homo sapiens
atacacaggcwttaagattat

SEQ ID NO: 9374 - DNA, 21 bp, Homo sapiens
cccccctcccytttttttttt

SEQ ID NO: 9375 - DNA, 21 bp, Homo sapiens
caggttacctrgaggttgaat

SEQ ID NO: 9376 - DNA, 21 bp, Homo sapiens
gtatgtaaatscatagaagca

SEQ ID NO: 9377 - DNA, 21 bp, Homo sapiens
ctgctgtcaakaaatttctat

SEQ ID NO: 9378 - DNA, 21 bp, Homo sapiens
tgcactagtcrccacagcaaa

SEQ ID NO: 9379 - DNA, 21 bp, Homo sapiens
ccccttcaaarcagtctttct

SEQ ID NO: 9380 - DNA, 21 bp, Homo sapiens
ttgaagcagcrttcataaatg

SEQ ID NO: 9381 - DNA, 21 bp, Homo sapiens
tgcaagcttgkcatattaatc

SEQ ID NO: 9382 - DNA, 21 bp, Homo sapiens
ccagccaaaakccagttgccc

SEQ ID NO: 9383 - DNA, 21 bp, Homo sapiens
actctgagggyataaaatgag

SEQ ID NO: 9384 - DNA, 21 bp, Homo sapiens
gtaatcatttytgttcatgag

SEQ ID NO: 9385 - DNA, 21 bp, Homo sapiens
ccaagagagtrctaactcagt

SEQ ID NO: 9386 - DNA, 21 bp, Homo sapiens
ccgagagcatyctgagcagaa

SEQ ID NO: 9387 - DNA, 21 bp, Homo sapiens
agatttctcckctatataata

SEQ ID NO: 9388 - DNA, 21 bp, Homo sapiens
gtagaatctcrtaccttaaga

SEQ ID NO: 9389 - DNA, 21 bp, Homo sapiens
aagcaaaagcwatatagggtg

SEQ ID NO: 9390 - DNA, 21 bp, Homo sapiens
ctagcacagtwtatcttactg

SEQ ID NO: 9391 - DNA, 21 bp, Homo sapiens
ttaccaagttkcaaaaggtat

SEQ ID NO: 9392 - DNA, 21 bp, Homo sapiens
tagaatttggycttctatatt

SEQ ID NO: 9393 - DNA, 21 bp, Homo sapiens
tgtaatgaaarcatgattcta

SEQ ID NO: 9394 - DNA, 21 bp, Homo sapiens
ctgctgagctmcagagagctt

SEQ ID NO: 9395 - DNA, 21 bp, Homo sapiens
atcatatcacrttggaagatt

SEQ ID NO: 9396 - DNA, 21 bp, Homo sapiens
caagtaaggcwagtgccacct

SEQ ID NO: 9397 - DNA, 21 bp, Homo sapiens
aatatgatcaytctaggatta

SEQ ID NO: 9398 - DNA, 21 bp, Homo sapiens
atctggacttyagtcagataa

SEQ ID NO: 9399 - DNA, 21 bp, Homo sapiens
tttaaaatgtrtctctctgtg

SEQ ID NO: 9400 - DNA, 21 bp, Homo sapiens
tcactaggctrcctctccatt

SEQ ID NO: 9401 - DNA, 21 bp, Homo sapiens
tgatcacttgycttccatccc

SEQ ID NO: 9402 - DNA, 21 bp, Homo sapiens
gggcagagcartgtctgtaat

SEQ ID NO: 9403 - DNA, 21 bp, Homo sapiens
agtataataartttctccagt

SEQ ID NO: 9404 - DNA, 21 bp, Homo sapiens
ttcttgaactrgtgaccatac

SEQ ID NO: 9405 - DNA, 21 bp, Homo sapiens
tatttgatcaragccttcatt

SEQ ID NO: 9406 - DNA, 21 bp, Homo sapiens
cctggctgctyctgaaatttt

SEQ ID NO: 9407 - DNA, 21 bp, Homo sapiens
ctgcatgacaygatctttttt

SEQ ID NO: 9408 - DNA, 21 bp, Homo sapiens
ctttctgggtrgctgtttttg

SEQ ID NO: 9409 - DNA, 21 bp, Homo sapiens
attcattacgygtgtatttag

SEQ ID NO: 9410 - DNA, 21 bp, Homo sapiens
atttagacatycttcaatttg

SEQ ID NO: 9411 - DNA, 21 bp, Homo sapiens
tctagcagagraaatgcttgt

SEQ ID NO: 9412 - DNA, 21 bp, Homo sapiens
ctcaattctayaaatatatgc

SEQ ID NO: 9413 - DNA, 21 bp, Homo sapiens
ggtactactgycagtaaatat

SEQ ID NO: 9414 - DNA, 21 bp, Homo sapiens
attcttggtamcttaagccac

SEQ ID NO: 9415 - DNA, 21 bp, Homo sapiens
attgggggacwcctagtcagt

SEQ ID NO: 9416 - DNA, 21 bp, Homo sapiens
ccttgtgttcrttaaagctgt

SEQ ID NO: 9417 - DNA, 21 bp, Homo sapiens
tacagatgttrtttaagaata

SEQ ID NO: 9418 - DNA, 21 bp, Homo sapiens
atgagctgaawgagtatcaag

SEQ ID NO: 9419 - DNA, 21 bp, Homo sapiens
agacaaagggrtttttaaaag

SEQ ID NO: 9420 - DNA, 21 bp, Homo sapiens
cctggcttaamattatcagaa

SEQ ID NO: 9421 - DNA, 21 bp, Homo sapiens
tacaggtacayttttaagttt

SEQ ID NO: 9422 - DNA, 21 bp, Homo sapiens
atatttaggawgcccccattt

SEQ ID NO: 9423 - DNA, 21 bp, Homo sapiens
ccaggttacaraaaaagaaag

SEQ ID NO: 9424 - DNA, 21 bp, Homo sapiens
gtagaataaarctattagtga

SEQ ID NO: 9425 - DNA, 21 bp, Homo sapiens
tttggaccagratggttgccc

SEQ ID NO: 9426 - DNA, 21 bp, Homo sapiens
tcgtgtccttyattttcttgt

SEQ ID NO: 9427 - DNA, 21 bp, Homo sapiens
ggatgtctttraaatgtgctt

SEQ ID NO: 9428 - DNA, 21 bp, Homo sapiens
tactgtatccraaagataatt

SEQ ID NO: 9429 - DNA, 21 bp, Homo sapiens
ataaaatgggwttaatatttg

SEQ ID NO: 9430 - DNA, 21 bp, Homo sapiens
tttacacatayttttcttaga

SEQ ID NO: 9431 - DNA, 21 bp, Homo sapiens
gaaatgggagrgcacaatgaa

SEQ ID NO: 9432 - DNA, 21 bp, Homo sapiens
cccactgatgrttacttcata

SEQ ID NO: 9433 - DNA, 21 bp, Homo sapiens
tgacttgcctrccttccccat

SEQ ID NO: 9434 - DNA, 21 bp, Homo sapiens
tggttttatgmatttttctgt

SEQ ID NO: 9435 - DNA, 21 bp, Homo sapiens
gtttcccagcrtcaaggacct

SEQ ID NO: 9436 - DNA, 21 bp, Homo sapiens
gaaaacctgcrtcttaccagt

SEQ ID NO: 9437 - DNA, 21 bp, Homo sapiens
taatatttctratgcccaaac

SEQ ID NO: 9438 - DNA, 21 bp, Homo sapiens
tatgttgagckggcactcaag

SEQ ID NO: 9439 - DNA, 21 bp, Homo sapiens
attttttcctrtctataattt

SEQ ID NO: 9440 - DNA, 21 bp, Homo sapiens
cttctagcctmcaaatgaaca

SEQ ID NO: 9441 - DNA, 21 bp, Homo sapiens
acaaaaatttkcccccacagg

SEQ ID NO: 9442 - DNA, 21 bp, Homo sapiens
tcagtgtaatragcagctcag

SEQ ID NO: 9443 - DNA, 21 bp, Homo sapiens
tagataatagyatttattggg

SEQ ID NO: 9444 - DNA, 21 bp, Homo sapiens
ccttaagtcawatctcagaaa

SEQ ID NO: 9445 - DNA, 21 bp, Homo sapiens
ggatccaaagygaaggaggag

SEQ ID NO: 9446 - DNA, 21 bp, Homo sapiens
taatattttaytcaccataaa

SEQ ID NO: 9447 - DNA, 21 bp, Homo sapiens
tccctgtccaygcacttaaat

SEQ ID NO: 9448 - DNA, 21 bp, Homo sapiens
atgtcaagggsggtgaggtta

SEQ ID NO: 9449 - DNA, 21 bp, Homo sapiens
cattgaggtayataatcagga

SEQ ID NO: 9450 - DNA, 21 bp, Homo sapiens
ctgtgtttttrttgaggtctg

SEQ ID NO: 9451 - DNA, 21 bp, Homo sapiens
ggaaaatctcwctctaaatag

SEQ ID NO: 9452 - DNA, 21 bp, Homo sapiens
atcttaacaayattgagtctt

SEQ ID NO: 9453 - DNA, 21 bp, Homo sapiens
tatgtgaccayaattgattgc

SEQ ID NO: 9454 - DNA, 21 bp, Homo sapiens
aaacctatatmgcttttcttg

SEQ ID NO: 9455 - DNA, 21 bp, Homo sapiens
tttaggcatcrccacataaga

SEQ ID NO: 9456 - DNA, 21 bp, Homo sapiens
tatattagacmcactgaagca

SEQ ID NO: 9457 - DNA, 21 bp, Homo sapiens
aagcacaaggytcctgcccca

SEQ ID NO: 9458 - DNA, 21 bp, Homo sapiens
tatttctcttycctgtgaacc

SEQ ID NO: 9459 - DNA, 21 bp, Homo sapiens
ctggcttagayactggaaaca

SEQ ID NO: 9460 - DNA, 21 bp, Homo sapiens
ggctagttttyggaaggcaat

SEQ ID NO: 9461 - DNA, 21 bp, Homo sapiens
accataactcwgtgttcctga

SEQ ID NO: 9462 - DNA, 21 bp, Homo sapiens
cagaaacctcrttttctatta

SEQ ID NO: 9463 - DNA, 21 bp, Homo sapiens
ggttttttttycttttttctt

SEQ ID NO: 9464 - DNA, 21 bp, Homo sapiens
ttagtgagatrggaaatatta

SEQ ID NO: 9465 - DNA, 21 bp, Homo sapiens
gaacgtgtaaraaaaaaaaat

SEQ ID NO: 9466 - DNA, 21 bp, Homo sapiens
ttacatttagyaataaatcaa

SEQ ID NO: 9467 - DNA, 21 bp, Homo sapiens
attctattagraagatgcctg

SEQ ID NO: 9468 - DNA, 21 bp, Homo sapiens
gaattcttcaragtttatgga

SEQ ID NO: 9469 - DNA, 21 bp, Homo sapiens
gcctctttctstatgttctgg

SEQ ID NO: 9470 - DNA, 21 bp, Homo sapiens
tagtgcctaayagagtacttg

SEQ ID NO: 9471 - DNA, 21 bp, Homo sapiens
acagataccarggcctacttg

SEQ ID NO: 9472 - DNA, 21 bp, Homo sapiens
ttgaatttacwaccttggtta

SEQ ID NO: 9473 - DNA, 21 bp, Homo sapiens
attatatatgmttttcaggtt

SEQ ID NO: 9474 - DNA, 21 bp, Homo sapiens
acagtgaacayatacatcatt

SEQ ID NO: 9475 - DNA, 21 bp, Homo sapiens
ttctttcagcraagctactaa

SEQ ID NO: 9476 - DNA, 21 bp, Homo sapiens
tcactctgcamgagaaaacaa

SEQ ID NO: 9477 - DNA, 21 bp, Homo sapiens
ggaaggcaaarttattagata

SEQ ID NO: 9478 - DNA, 21 bp, Homo sapiens
tttttggttgkttgtttgttt

SEQ ID NO: 9479 - DNA, 21 bp, Homo sapiens
tgttatcactkgcaaactagc

SEQ ID NO: 9480 - DNA, 21 bp, Homo sapiens
tgatggctccyatcaactcct

SEQ ID NO: 9481 - DNA, 21 bp, Homo sapiens
tctattttggyactgtatgca

SEQ ID NO: 9482 - DNA, 21 bp, Homo sapiens
aattagtgccmccactatgta

SEQ ID NO: 9483 - DNA, 21 bp, Homo sapiens
gtctgcattcyagcccctgat

SEQ ID NO: 9484 - DNA, 21 bp, Homo sapiens
ttctagccccygatggcaagg

SEQ ID NO: 9485 - DNA, 21 bp, Homo sapiens
gtcttaaccarttccagcagc

SEQ ID NO: 9486 - DNA, 21 bp, Homo sapiens
ataaacaactwaaccccaaag

SEQ ID NO: 9487 - DNA, 21 bp, Homo sapiens
gaagataattrccatgcctat

SEQ ID NO: 9488 - DNA, 21 bp, Homo sapiens
tttgtatctgyaggacttgaa

SEQ ID NO: 9489 - DNA, 21 bp, Homo sapiens
gataccccagkgacaacggaa

SEQ ID NO: 9490 - DNA, 21 bp, Homo sapiens
acatgggggargcacacatta

SEQ ID NO: 9491 - DNA, 21 bp, Homo sapiens
ctagatcctcrctaacttgcc

SEQ ID NO: 9492 - DNA, 21 bp, Homo sapiens
tgtagtgttayagaccatata

SEQ ID NO: 9493 - DNA, 21 bp, Homo sapiens
taaacctattrtaaaaagcac

SEQ ID NO: 9494 - DNA, 21 bp, Homo sapiens
tcaacaatatytcatgctctc

SEQ ID NO: 9495 - DNA, 21 bp, Homo sapiens
gccttagagaraacaagacat

SEQ ID NO: 9496 - DNA, 21 bp, Homo sapiens
gcatgtaatgytgcagtgacc

SEQ ID NO: 9497 - DNA, 21 bp, Homo sapiens
atggtattcayggaagaattt

SEQ ID NO: 9498 - DNA, 21 bp, Homo sapiens
ccatgcaaaamctttgtatgt

SEQ ID NO: 9499 - DNA, 21 bp, Homo sapiens
cttattaatgrtatacctaca

SEQ ID NO: 9500 - DNA, 21 bp, Homo sapiens
ttcagttatgrttagtcaaca

SEQ ID NO: 9501 - DNA, 21 bp, Homo sapiens
acagaatttcsctaacaccat

SEQ ID NO: 9502 - DNA, 21 bp, Homo sapiens
atttaattcayatttatttgc

SEQ ID NO: 9503 - DNA, 21 bp, Homo sapiens
aaataattacyagagctaata

SEQ ID NO: 9504 - DNA, 21 bp, Homo sapiens
atcccttatcygtgacatctg

SEQ ID NO: 9505 - DNA, 21 bp, Homo sapiens
gactccagcawtcagtgattg

SEQ ID NO: 9506 - DNA, 21 bp, Homo sapiens
tatgtggttgkccagtataag

SEQ ID NO: 9507 - DNA, 21 bp, Homo sapiens
ctccattatgwtatttcattc

SEQ ID NO: 9508 - DNA, 21 bp, Homo sapiens
gcttcctggcyggtgattaga

SEQ ID NO: 9509 - DNA, 21 bp, Homo sapiens
gcaaacatcgytattaggtaa

SEQ ID NO: 9510 - DNA, 21 bp, Homo sapiens
tcagataactraaatctgtaa

SEQ ID NO: 9511 - DNA, 21 bp, Homo sapiens
ttaaattgtayatactttaaa

SEQ ID NO: 9512 - DNA, 21 bp, Homo sapiens
agactatcacrgattactcag

SEQ ID NO: 9513 - DNA, 21 bp, Homo sapiens
atacccaatgstgggcagagg

SEQ ID NO: 9514 - DNA, 21 bp, Homo sapiens
cacacgtttaratactatatt

SEQ ID NO: 9515 - DNA, 21 bp, Homo sapiens
gcccaaacaasagcctcaata

SEQ ID NO: 9516 - DNA, 21 bp, Homo sapiens
tctaaagataygatcatgtta

SEQ ID NO: 9517 - DNA, 21 bp, Homo sapiens
agttctaaaaygttcatatcc

SEQ ID NO: 9518 - DNA, 21 bp, Homo sapiens
tgaaatcacawtctactatgt

SEQ ID NO: 9519 - DNA, 21 bp, Homo sapiens
aaaatcagacscttcagagtt

SEQ ID NO: 9520 - DNA, 21 bp, Homo sapiens
tggaggatatmaaaaggaaag

SEQ ID NO: 9521 - DNA, 21 bp, Homo sapiens
acttagaatcrccaacctgct

SEQ ID NO: 9522 - DNA, 21 bp, Homo sapiens
ggtatgactaygtaccttggg

SEQ ID NO: 9523 - DNA, 21 bp, Homo sapiens
tctctgcataktgaatgggtt

SEQ ID NO: 9524 - DNA, 21 bp, Homo sapiens
tgagccagggmaggatgggtg

SEQ ID NO: 9525 - DNA, 21 bp, Homo sapiens
ggtaaccttawaagaagaccc

SEQ ID NO: 9526 - DNA, 21 bp, Homo sapiens
ataatattctyagtaaacatg

SEQ ID NO: 9527 - DNA, 21 bp, Homo sapiens
tgtcagaggcytgagaaggag

SEQ ID NO: 9528 - DNA, 21 bp, Homo sapiens
aagtggtatarttagagaatt

SEQ ID NO: 9529 - DNA, 21 bp, Homo sapiens
aagtttgcctsgttcctgcag

SEQ ID NO: 9530 - DNA, 21 bp, Homo sapiens
cattttttagytgaaaagcct

SEQ ID NO: 9531 - DNA, 21 bp, Homo sapiens
gagcccctgcygcccctgctc

SEQ ID NO: 9532 - DNA, 21 bp, Homo sapiens
catactagtawattctggggc

SEQ ID NO: 9533 - DNA, 21 bp, Homo sapiens
cataccctatyattcaagcag

SEQ ID NO: 9534 - DNA, 21 bp, Homo sapiens
attattctgaygcccaaggtc

SEQ ID NO: 9535 - DNA, 21 bp, Homo sapiens
gaattatatgmccaacttatg

SEQ ID NO: 9536 - DNA, 21 bp, Homo sapiens
atggaattgtrgtaagagaaa

SEQ ID NO: 9537 - DNA, 21 bp, Homo sapiens
atatttgccarcagaatgtgc

SEQ ID NO: 9538 - DNA, 21 bp, Homo sapiens
gcttggtccayctcatcctgt

SEQ ID NO: 9539 - DNA, 21 bp, Homo sapiens
caatagaagawtagataagta

SEQ ID NO: 9540 - DNA, 21 bp, Homo sapiens
caagagttttyctattatttg

SEQ ID NO: 9541 - DNA, 21 bp, Homo sapiens
tttctccttgyaggtgtgtaa

SEQ ID NO: 9542 - DNA, 21 bp, Homo sapiens
ctggtgactgraggacacatt

SEQ ID NO: 9543 - DNA, 21 bp, Homo sapiens
cctggattttycctatgcagt

SEQ ID NO: 9544 - DNA, 21 bp, Homo sapiens
ttagctgcccyggctggtgtc

SEQ ID NO: 9545 - DNA, 21 bp, Homo sapiens
agtgctgggtkgtatgaaact

SEQ ID NO: 9546 - DNA, 21 bp, Homo sapiens
ttgaagccttmgttatataac

SEQ ID NO: 9547 - DNA, 21 bp, Homo sapiens
acacatcatayagcaactatt

SEQ ID NO: 9548 - DNA, 21 bp, Homo sapiens
gaggcctggargtactaataa

SEQ ID NO: 9549 - DNA, 21 bp, Homo sapiens
attcagtatayataacataaa

SEQ ID NO: 9550 - DNA, 21 bp, Homo sapiens
atgaaaggtaygttcagaccg

SEQ ID NO: 9551 - DNA, 21 bp, Homo sapiens
taataacaacrgctaacacat

SEQ ID NO: 9552 - DNA, 21 bp, Homo sapiens
gccattataayaggaatggat

SEQ ID NO: 9553 - DNA, 21 bp, Homo sapiens
tttattttttwaaaaaatggg

SEQ ID NO: 9554 - DNA, 21 bp, Homo sapiens
aaaaactcaayaggaaaaaaa

SEQ ID NO: 9555 - DNA, 21 bp, Homo sapiens
ccagaggacayaggaacttgc

SEQ ID NO: 9556 - DNA, 21 bp, Homo sapiens
tcatttattcyactatcaatt

SEQ ID NO: 9557 - DNA, 21 bp, Homo sapiens
aaggaggtccracatccaaat

SEQ ID NO: 9558 - DNA, 21 bp, Homo sapiens
actggtcaatrttatgtggat

SEQ ID NO: 9559 - DNA, 21 bp, Homo sapiens
atgggaagcarcaacagccag

SEQ ID NO: 9560 - DNA, 21 bp, Homo sapiens
gaaataaagcrtacactcata

SEQ ID NO: 9561 - DNA, 21 bp, Homo sapiens
tcaagataacytggatagttt

SEQ ID NO: 9562 - DNA, 21 bp, Homo sapiens
aaattaggaakcagtgatttt

SEQ ID NO: 9563 - DNA, 21 bp, Homo sapiens
ttactgcagcmaaattgagta

SEQ ID NO: 9564 - DNA, 21 bp, Homo sapiens
ttaaagactayatgtactgat

SEQ ID NO: 9565 - DNA, 21 bp, Homo sapiens
taatgaaatgrgactttgtta

SEQ ID NO: 9566 - DNA, 21 bp, Homo sapiens
taccctctgtrtaatgttgaa

SEQ ID NO: 9567 - DNA, 21 bp, Homo sapiens
ttggtagaaarcaatgaagag

SEQ ID NO: 9568 - DNA, 21 bp, Homo sapiens
tgaagaagaaytggctagaaa

SEQ ID NO: 9569 - DNA, 21 bp, Homo sapiens
caaaatagatmacatgctaac

SEQ ID NO: 9570 - DNA, 21 bp, Homo sapiens
gaacctgggtwattctgtgaa

SEQ ID NO: 9571 - DNA, 21 bp, Homo sapiens
gaaaatctgcygttatagggt

SEQ ID NO: 9572 - DNA, 21 bp, Homo sapiens
tatgaagagamacaggctgtt

SEQ ID NO: 9573 - DNA, 21 bp, Homo sapiens
agtcaaacaayctttgaaaag

SEQ ID NO: 9574 - DNA, 21 bp, Homo sapiens
gagacactcartccttgcctg

SEQ ID NO: 9575 - DNA, 21 bp, Homo sapiens
aactcttcacrgtgtactatg

SEQ ID NO: 9576 - DNA, 21 bp, Homo sapiens
accacaaagamctaacaatca

SEQ ID NO: 9577 - DNA, 21 bp, Homo sapiens
ctggcctgttyatagtgaata

SEQ ID NO: 9578 - DNA, 21 bp, Homo sapiens
tggactgcaayagccaaattg

SEQ ID NO: 9579 - DNA, 21 bp, Homo sapiens
gggaaaagagsatgtgtgtga

SEQ ID NO: 9580 - DNA, 21 bp, Homo sapiens
caccaaaacgrccaagaaaaa

SEQ ID NO: 9581 - DNA, 21 bp, Homo sapiens
ttctgggtttygggcaacgtt

SEQ ID NO: 9582 - DNA, 21 bp, Homo sapiens
gagaagaatcrcaaagacaaa

SEQ ID NO: 9583 - DNA, 21 bp, Homo sapiens
ctcctccccawgtctctcatc

SEQ ID NO: 9584 - DNA, 21 bp, Homo sapiens
tctaaaaggtragtacaatgt

SEQ ID NO: 9585 - DNA, 21 bp, Homo sapiens
ctagaattacrtcaaattgag

SEQ ID NO: 9586 - DNA, 21 bp, Homo sapiens
gaacttaattmcatagttaaa

SEQ ID NO: 9587 - DNA, 21 bp, Homo sapiens
aattcttcatkgtctcaaatg

SEQ ID NO: 9588 - DNA, 21 bp, Homo sapiens
atagacatacrttaccaaaaa

SEQ ID NO: 9589 - DNA, 21 bp, Homo sapiens
acaataaaaaygcacatatat

SEQ ID NO: 9590 - DNA, 21 bp, Homo sapiens
cctttctttcrtattctagag

SEQ ID NO: 9591 - DNA, 21 bp, Homo sapiens
aaatttaccartcaaaggtct

SEQ ID NO: 9592 - DNA, 21 bp, Homo sapiens
ttacattttgstaattaaaaa

SEQ ID NO: 9593 - DNA, 21 bp, Homo sapiens
tggaggctgckgcaacaatgt

SEQ ID NO: 9594 - DNA, 21 bp, Homo sapiens
caggtactgaragtgggtggt

SEQ ID NO: 9595 - DNA, 21 bp, Homo sapiens
aatcattatcrtgtgactcat

SEQ ID NO: 9596 - DNA, 21 bp, Homo sapiens
tgtctactgaktttcataaac

SEQ ID NO: 9597 - DNA, 21 bp, Homo sapiens
ctaggtctctytgaagaggca

SEQ ID NO: 9598 - DNA, 21 bp, Homo sapiens
aagctcaaatkacctacttaa

SEQ ID NO: 9599 - DNA, 21 bp, Homo sapiens
agatcctgggracattttgac

SEQ ID NO: 9600 - DNA, 21 bp, Homo sapiens
ggccactcaasgttctctttg

SEQ ID NO: 9601 - DNA, 21 bp, Homo sapiens
tgtttcagcarttctacaacc

SEQ ID NO: 9602 - DNA, 21 bp, Homo sapiens
aatatgactayatatgcccac

SEQ ID NO: 9603 - DNA, 21 bp, Homo sapiens
agtaacaaggyatctaaagac

SEQ ID NO: 9604 - DNA, 21 bp, Homo sapiens
gggaatgaagrgtggaattag

SEQ ID NO: 9605 - DNA, 21 bp, Homo sapiens
cagaaaggacrttgcctaaaa

SEQ ID NO: 9606 - DNA, 21 bp, Homo sapiens
gttagtctcaytcaaaaacac

SEQ ID NO: 9607 - DNA, 21 bp, Homo sapiens
ttcaattcagygccactcaca

SEQ ID NO: 9608 - DNA, 21 bp, Homo sapiens
ttattaagttstaatctgtaa

SEQ ID NO: 9609 - DNA, 21 bp, Homo sapiens
gtcaaggcagmtagaatgggg

SEQ ID NO: 9610 - DNA, 21 bp, Homo sapiens
taaaggataaytatttgttca

SEQ ID NO: 9611 - DNA, 21 bp, Homo sapiens
aggacagatayaaagaagtga

SEQ ID NO: 9612 - DNA, 21 bp, Homo sapiens
acatattgatragccagtatg

SEQ ID NO: 9613 - DNA, 21 bp, Homo sapiens
ggagactttartaccccactg

SEQ ID NO: 9614 - DNA, 21 bp, Homo sapiens
acttagccatkcatggtggca

SEQ ID NO: 9615 - DNA, 21 bp, Homo sapiens
aaactttttcrcagagttgaa

SEQ ID NO: 9616 - DNA, 21 bp, Homo sapiens
gacaaattttsaagacaagtt

SEQ ID NO: 9617 - DNA, 21 bp, Homo sapiens
ctgtgtcacarttgggtttag

SEQ ID NO: 9618 - DNA, 21 bp, Homo sapiens
ctacagcaaaygtgggccctt

SEQ ID NO: 9619 - DNA, 21 bp, Homo sapiens
tgttgcctaamtcctatgact

SEQ ID NO: 9620 - DNA, 21 bp, Homo sapiens
agttggggtgyaatatatcta

SEQ ID NO: 9621 - DNA, 21 bp, Homo sapiens
ccagcagtagktgacaggctt

SEQ ID NO: 9622 - DNA, 21 bp, Homo sapiens
ttaaacaatgkctacggtgat

SEQ ID NO: 9623 - DNA, 21 bp, Homo sapiens
gacaagtctcytccttgggta

SEQ ID NO: 9624 - DNA, 21 bp, Homo sapiens
tccatcccggytgctttcatg

SEQ ID NO: 9625 - DNA, 21 bp, Homo sapiens
cagtggagtasgaacaccagg

SEQ ID NO: 9626 - DNA, 21 bp, Homo sapiens
atctttcttcyaatggaaatg

SEQ ID NO: 9627 - DNA, 21 bp, Homo sapiens
ctgcagttgtktatatttcac

SEQ ID NO: 9628 - DNA, 21 bp, Homo sapiens
cttccactgamagcctgggat

SEQ ID NO: 9629 - DNA, 21 bp, Homo sapiens
agaaaggaagmgcagaagtcg

SEQ ID NO: 9630 - DNA, 21 bp, Homo sapiens
gaagtcagaaktctgaaatgg

SEQ ID NO: 9631 - DNA, 21 bp, Homo sapiens
aatacaaatakctaaacactg

SEQ ID NO: 9632 - DNA, 21 bp, Homo sapiens
tttttcctctrtcttttctat

SEQ ID NO: 9633 - DNA, 21 bp, Homo sapiens
gccccagtacrtctggcagcc

SEQ ID NO: 9634 - DNA, 21 bp, Homo sapiens
atttttttaasacccaacaat

SEQ ID NO: 9635 - DNA, 21 bp, Homo sapiens
aaaataaattwaaaaactatt

SEQ ID NO: 9636 - DNA, 21 bp, Homo sapiens
ctgttaatccrtctgggtctg

SEQ ID NO: 9637 - DNA, 21 bp, Homo sapiens
aatcttcaacsaataaaggat

SEQ ID NO: 9638 - DNA, 21 bp, Homo sapiens
cattttcaaasggtacacagc

SEQ ID NO: 9639 - DNA, 21 bp, Homo sapiens
tttttgctcartcttctttgt

SEQ ID NO: 9640 - DNA, 21 bp, Homo sapiens
ggaatagcttmgaaattagaa

SEQ ID NO: 9641 - DNA, 21 bp, Homo sapiens
tataacactawgactattttg

SEQ ID NO: 9642 - DNA, 21 bp, Homo sapiens
ttgcaatgagytcggagtttt

SEQ ID NO: 9643 - DNA, 21 bp, Homo sapiens
ctgcatgattsacagtagcct

SEQ ID NO: 9644 - DNA, 21 bp, Homo sapiens
cagacatagamcttgctagag

SEQ ID NO: 9645 - DNA, 21 bp, Homo sapiens
tgattagtaayggaaagagat

SEQ ID NO: 9646 - DNA, 21 bp, Homo sapiens
aaaatttatcyaaaactctta

SEQ ID NO: 9647 - DNA, 21 bp, Homo sapiens
tactaaactayactggatgca

SEQ ID NO: 9648 - DNA, 21 bp, Homo sapiens
ttttcagtagrggggctttaa

SEQ ID NO: 9649 - DNA, 21 bp, Homo sapiens
gagagtcgctrcaggagtttt

SEQ ID NO: 9650 - DNA, 21 bp, Homo sapiens
tagccatggcrgaaggaaaaa

SEQ ID NO: 9651 - DNA, 21 bp, Homo sapiens
ataggtaggaytgcttactgc

SEQ ID NO: 9652 - DNA, 21 bp, Homo sapiens
tcaagcaaatmctgcatcatg

SEQ ID NO: 9653 - DNA, 21 bp, Homo sapiens
ataagtcatcrgtgagcacag

SEQ ID NO: 9654 - DNA, 21 bp, Homo sapiens
cattctctgaraaccctcctt

SEQ ID NO: 9655 - DNA, 21 bp, Homo sapiens
cagtacaattrttggtaggta

SEQ ID NO: 9656 - DNA, 21 bp, Homo sapiens
agactcaactrgtaggcttta

SEQ ID NO: 9657 - DNA, 21 bp, Homo sapiens
tgggaagcaayatatactatt

SEQ ID NO: 9658 - DNA, 21 bp, Homo sapiens
ctcaaagactrgaaaatgtaa

SEQ ID NO: 9659 - DNA, 21 bp, Homo sapiens
gttcaacatcyggtatatctt

SEQ ID NO: 9660 - DNA, 21 bp, Homo sapiens
tcctacctccyagtgcagcat

SEQ ID NO: 9661 - DNA, 21 bp, Homo sapiens
aaggaagaatrgtgcaatttt

SEQ ID NO: 9662 - DNA, 21 bp, Homo sapiens
ctattcagccwtcttggaagc

SEQ ID NO: 9663 - DNA, 21 bp, Homo sapiens
aggccttcttkgctctacttg

SEQ ID NO: 9664 - DNA, 21 bp, Homo sapiens
gttattattgrccaggtgcag

SEQ ID NO: 9665 - DNA, 21 bp, Homo sapiens
tattatctacrttcttgacgt

SEQ ID NO: 9666 - DNA, 21 bp, Homo sapiens
tagtagagaayggtatttaaa

SEQ ID NO: 9667 - DNA, 21 bp, Homo sapiens
gctgagtcaasagcataatgg

SEQ ID NO: 9668 - DNA, 21 bp, Homo sapiens
ctgcccctacrtgttctgccc

SEQ ID NO: 9669 - DNA, 21 bp, Homo sapiens
taaaagcccarttgttatctc

SEQ ID NO: 9670 - DNA, 21 bp, Homo sapiens
aacaaaaggtyggttgtcggt

SEQ ID NO: 9671 - DNA, 21 bp, Homo sapiens
tacctagtctygctctgtgtc

SEQ ID NO: 9672 - DNA, 21 bp, Homo sapiens
ttgtctgatayttgattaata

SEQ ID NO: 9673 - DNA, 21 bp, Homo sapiens
ggcatcacgcraactcagtgt

SEQ ID NO: 9674 - DNA, 21 bp, Homo sapiens
ggtgacagggyccgggaaggg

SEQ ID NO: 9675 - DNA, 21 bp, Homo sapiens
aaccattatgyttacttactt

SEQ ID NO: 9676 - DNA, 21 bp, Homo sapiens
ctagatatctrttcccaaatt

SEQ ID NO: 9677 - DNA, 21 bp, Homo sapiens
tttaatccttrtaatacgatt

SEQ ID NO: 9678 - DNA, 21 bp, Homo sapiens
agggttgatasagtcttggca

SEQ ID NO: 9679 - DNA, 21 bp, Homo sapiens
agacacataarcagagctaca

SEQ ID NO: 9680 - DNA, 21 bp, Homo sapiens
cccacaaagcrgagatagaaa

SEQ ID NO: 9681 - DNA, 21 bp, Homo sapiens
gtctagatctyctggagaaat

SEQ ID NO: 9682 - DNA, 21 bp, Homo sapiens
gaaatgtaatmggtggctaca

SEQ ID NO: 9683 - DNA, 21 bp, Homo sapiens
ttgtaagactrtaaggaaata

SEQ ID NO: 9684 - DNA, 21 bp, Homo sapiens
acaggcagagstgagtaattg

SEQ ID NO: 9685 - DNA, 21 bp, Homo sapiens
tggctctacaygcttcttcat

SEQ ID NO: 9686 - DNA, 21 bp, Homo sapiens
aacctatcaaktactacatgg

SEQ ID NO: 9687 - DNA, 21 bp, Homo sapiens
tcaccccttamctctgctctt

SEQ ID NO: 9688 - DNA, 21 bp, Homo sapiens
atctatgacayaaaaaagcat

SEQ ID NO: 9689 - DNA, 21 bp, Homo sapiens
aatgccccttmtctggctttc

SEQ ID NO: 9690 - DNA, 21 bp, Homo sapiens
tcaaactaacrggatttcagg

SEQ ID NO: 9691 - DNA, 21 bp, Homo sapiens
attgttttttrcatcccactc

SEQ ID NO: 9692 - DNA, 21 bp, Homo sapiens
gtaaaaatatmtgttatattc

SEQ ID NO: 9693 - DNA, 21 bp, Homo sapiens
taccagttgtyacacactgct

SEQ ID NO: 9694 - DNA, 21 bp, Homo sapiens
cctccattctygggtaattcc

SEQ ID NO: 9695 - DNA, 21 bp, Homo sapiens
ttaaaattacrtatgtggctt

SEQ ID NO: 9696 - DNA, 21 bp, Homo sapiens
tgccagcagastccactccct

SEQ ID NO: 9697 - DNA, 21 bp, Homo sapiens
ctctaggaccmcgaccagtac

SEQ ID NO: 9698 - DNA, 21 bp, Homo sapiens
ggagtagttcrtaatgttttg

SEQ ID NO: 9699 - DNA, 21 bp, Homo sapiens
ccattgctgcyatcacctctt

SEQ ID NO: 9700 - DNA, 21 bp, Homo sapiens
gcttgtacatwctaaaactgc

SEQ ID NO: 9701 - DNA, 21 bp, Homo sapiens
ccttgctgtcyacaatgcccg

SEQ ID NO: 9702 - DNA, 21 bp, Homo sapiens
gatcctttaargatttttcct

SEQ ID NO: 9703 - DNA, 21 bp, Homo sapiens
caaaagttacktgcagatttt

SEQ ID NO: 9704 - DNA, 21 bp, Homo sapiens
atttctttcartatttcttgt

SEQ ID NO: 9705 - DNA, 21 bp, Homo sapiens
ctccataccarggtaaattct

SEQ ID NO: 9706 - DNA, 21 bp, Homo sapiens
cctggtgtgcyaggtcctgac

SEQ ID NO: 9707 - DNA, 21 bp, Homo sapiens
tgtgccaggtmctgactgaaa

SEQ ID NO: 9708 - DNA, 21 bp, Homo sapiens
cttaataactscaacctaaga

SEQ ID NO: 9709 - DNA, 21 bp, Homo sapiens
tgactggattrtctgagaacc

SEQ ID NO: 9710 - DNA, 21 bp, Homo sapiens
atatacttttrgaagagctat

SEQ ID NO: 9711 - DNA, 21 bp, Homo sapiens
ttccttttctrtttggatgcc

SEQ ID NO: 9712 - DNA, 21 bp, Homo sapiens
cagtgcagttyaagggaattc

SEQ ID NO: 9713 - DNA, 21 bp, Homo sapiens
tactgtatttkaaatattcag

SEQ ID NO: 9714 - DNA, 21 bp, Homo sapiens
cttcccccccsccaaaatcat

SEQ ID NO: 9715 - DNA, 21 bp, Homo sapiens
aaattacttgmagttcttgtt

SEQ ID NO: 9716 - DNA, 21 bp, Homo sapiens
gttttgggccrtgctttttgg

SEQ ID NO: 9717 - DNA, 21 bp, Homo sapiens
gaatgtcattrgttcttggct

SEQ ID NO: 9718 - DNA, 21 bp, Homo sapiens
tgtttatatarcctcactaga

SEQ ID NO: 9719 - DNA, 21 bp, Homo sapiens
aaatgagcaayaatttggtaa

SEQ ID NO: 9720 - DNA, 21 bp, Homo sapiens
tttttcaaaasggtgttgtac

SEQ ID NO: 9721 - DNA, 21 bp, Homo sapiens
ctgccacttcsttgatttaga

SEQ ID NO: 9722 - DNA, 21 bp, Homo sapiens
ccagcctccarattctgtttt

SEQ ID NO: 9723 - DNA, 21 bp, Homo sapiens
gctgtagttgmtgttgctaga

SEQ ID NO: 9724 - DNA, 21 bp, Homo sapiens
gggtttttttkgtttgttttt

SEQ ID NO: 9725 - DNA, 21 bp, Homo sapiens
attttattatygttgttatga

SEQ ID NO: 9726 - DNA, 21 bp, Homo sapiens
aaacaaaacaraaaacatgaa

SEQ ID NO: 9727 - DNA, 21 bp, Homo sapiens
agtgcaaagtktggtgtaaga

SEQ ID NO: 9728 - DNA, 21 bp, Homo sapiens
tatagtatggytatatacata

SEQ ID NO: 9729 - DNA, 21 bp, Homo sapiens
ggaggatcacrcacttcagtc

SEQ ID NO: 9730 - DNA, 21 bp, Homo sapiens
tcctcccctgsttgagagagc

SEQ ID NO: 9731 - DNA, 21 bp, Homo sapiens
tttgaaccttsccggaaagga

SEQ ID NO: 9732 - DNA, 21 bp, Homo sapiens
taaatatattrttcttctacc

SEQ ID NO: 9733 - DNA, 21 bp, Homo sapiens
cacattgctaktgctctctct

SEQ ID NO: 9734 - DNA, 21 bp, Homo sapiens
aattaaaaagwctactttgaa

SEQ ID NO: 9735 - DNA, 21 bp, Homo sapiens
ataactactcwgcagctgcca

SEQ ID NO: 9736 - DNA, 21 bp, Homo sapiens
gctaagcaccyagaagataaa

SEQ ID NO: 9737 - DNA, 21 bp, Homo sapiens
ggtaaagactrggagaggcgg

SEQ ID NO: 9738 - DNA, 21 bp, Homo sapiens
aacaaaacaamattacaagtg

SEQ ID NO: 9739 - DNA, 21 bp, Homo sapiens
ctacactattkggtttaaata

SEQ ID NO: 9740 - DNA, 21 bp, Homo sapiens
ttctattttcycacctgctgt

SEQ ID NO: 9741 - DNA, 21 bp, Homo sapiens
aaggagagcckagagctagtt

SEQ ID NO: 9742 - DNA, 21 bp, Homo sapiens
gaaacatctgsaatgacgact

SEQ ID NO: 9743 - DNA, 21 bp, Homo sapiens
actgctgaccraacatgaaac

SEQ ID NO: 9744 - DNA, 21 bp, Homo sapiens
cagggattagrgcttgatatt

SEQ ID NO: 9745 - DNA, 21 bp, Homo sapiens
gatttgacatwaccaacaaca

SEQ ID NO: 9746 - DNA, 21 bp, Homo sapiens
gacaatcatgytgatgggaaa

SEQ ID NO: 9747 - DNA, 21 bp, Homo sapiens
gcaatgaaaaygttaatgaaa

SEQ ID NO: 9748 - DNA, 21 bp, Homo sapiens
tagactactgygtccatgcat

SEQ ID NO: 9749 - DNA, 21 bp, Homo sapiens
atctgaatccmaaataccatc

SEQ ID NO: 9750 - DNA, 21 bp, Homo sapiens
taccacacatsaggctttata

SEQ ID NO: 9751 - DNA, 21 bp, Homo sapiens
aagctgtttastacagtggtt

SEQ ID NO: 9752 - DNA, 21 bp, Homo sapiens
gaaaaagcatycctctggtcc

SEQ ID NO: 9753 - DNA, 21 bp, Homo sapiens
cacaaatgagkcaagactcga

SEQ ID NO: 9754 - DNA, 21 bp, Homo sapiens
ttaattattayatcacccttg

SEQ ID NO: 9755 - DNA, 21 bp, Homo sapiens
tgttttacttmgaaataactt

SEQ ID NO: 9756 - DNA, 21 bp, Homo sapiens
gaaacaaatcwttatgaattc

SEQ ID NO: 9757 - DNA, 21 bp, Homo sapiens
caaattgttayatgatcacat

SEQ ID NO: 9758 - DNA, 21 bp, Homo sapiens
gaggagtggaracttttatat

SEQ ID NO: 9759 - DNA, 21 bp, Homo sapiens
caagtaactcyagcacttgct

SEQ ID NO: 9760 - DNA, 21 bp, Homo sapiens
gtaaataaaawagaatcccaa

SEQ ID NO: 9761 - DNA, 21 bp, Homo sapiens
gagaatgtgakagtaacaagt

SEQ ID NO: 9762 - DNA, 21 bp, Homo sapiens
agtatttaccygtcctttagc

SEQ ID NO: 9763 - DNA, 21 bp, Homo sapiens
agttgtcttcmgtcaatactg

SEQ ID NO: 9764 - DNA, 21 bp, Homo sapiens
ttcaattgctrtatgattttt

SEQ ID NO: 9765 - DNA, 21 bp, Homo sapiens
caagatttctwaatatgatta

SEQ ID NO: 9766 - DNA, 21 bp, Homo sapiens
tgtggaaacayaaaagaggca

SEQ ID NO: 9767 - DNA, 21 bp, Homo sapiens
tacctgcaacyagtttatttc

SEQ ID NO: 9768 - DNA, 21 bp, Homo sapiens
gagcaaaagayggttatgatt

SEQ ID NO: 9769 - DNA, 21 bp, Homo sapiens
cactctgcatyttaatctagg

SEQ ID NO: 9770 - DNA, 21 bp, Homo sapiens
aaactcttggratattaatcc

SEQ ID NO: 9771 - DNA, 21 bp, Homo sapiens
gttctttctgycccaaattta

SEQ ID NO: 9772 - DNA, 21 bp, Homo sapiens
ctttagtattycatttaacct

SEQ ID NO: 9773 - DNA, 21 bp, Homo sapiens
caataaagcaytggtctttcc

SEQ ID NO: 9774 - DNA, 21 bp, Homo sapiens
aacaagttgaktacattaaat

SEQ ID NO: 9775 - DNA, 21 bp, Homo sapiens
ggggtaggagrtagtatatat

SEQ ID NO: 9776 - DNA, 21 bp, Homo sapiens
tttatgacagyatcatattaa

SEQ ID NO: 9777 - DNA, 21 bp, Homo sapiens
tgttacctggsagacaggtct

SEQ ID NO: 9778 - DNA, 21 bp, Homo sapiens
tcaaacagcgkattaattttc

SEQ ID NO: 9779 - DNA, 21 bp, Homo sapiens
gagaaagaacygcctgctaca

SEQ ID NO: 9780 - DNA, 21 bp, Homo sapiens
aaatactggastttttatact

SEQ ID NO: 9781 - DNA, 21 bp, Homo sapiens
aatacaaaaasagaaattgtt

SEQ ID NO: 9782 - DNA, 21 bp, Homo sapiens
tttagttttcycccataacta

SEQ ID NO: 9783 - DNA, 21 bp, Homo sapiens
ctcaaggacawagtaacacta

SEQ ID NO: 9784 - DNA, 21 bp, Homo sapiens
ttggtaaatayttttaagaaa

SEQ ID NO: 9785 - DNA, 21 bp, Homo sapiens
gttgttgatargtgtagtgtt

SEQ ID NO: 9786 - DNA, 21 bp, Homo sapiens
tatgggaaggytaaatattta

SEQ ID NO: 9787 - DNA, 21 bp, Homo sapiens
taacaatttcygcatgtatat

SEQ ID NO: 9788 - DNA, 21 bp, Homo sapiens
agcaaagactrcaagtgtaca

SEQ ID NO: 9789 - DNA, 21 bp, Homo sapiens
tttaataaggytgcaagatgt

SEQ ID NO: 9790 - DNA, 21 bp, Homo sapiens
tgtctacgtgmagtggcagcc

SEQ ID NO: 9791 - DNA, 21 bp, Homo sapiens
cagaagagaamaaatattttc

SEQ ID NO: 9792 - DNA, 21 bp, Homo sapiens
ataaaaggtgrcactaaatga

SEQ ID NO: 9793 - DNA, 21 bp, Homo sapiens
taaaatgatayttaaattgag

SEQ ID NO: 9794 - DNA, 21 bp, Homo sapiens
tgtatgaagayttctttcatt

SEQ ID NO: 9795 - DNA, 21 bp, Homo sapiens
gaggctctackgggtaaaagc

SEQ ID NO: 9796 - DNA, 21 bp, Homo sapiens
tgtaaacggayatatatccca

SEQ ID NO: 9797 - DNA, 21 bp, Homo sapiens
cctctctgacracagaccacc

SEQ ID NO: 9798 - DNA, 21 bp, Homo sapiens
aaaaacaagtrccagctcagg

SEQ ID NO: 9799 - DNA, 21 bp, Homo sapiens
tatcccttctrtaatatggtt

SEQ ID NO: 9800 - DNA, 21 bp, Homo sapiens
attgaggaatwtccctcagaa

SEQ ID NO: 9801 - DNA, 21 bp, Homo sapiens
acctgtatacmtataagcctc

SEQ ID NO: 9802 - DNA, 21 bp, Homo sapiens
cataaggctaycacacacaat

SEQ ID NO: 9803 - DNA, 21 bp, Homo sapiens
acctgaataaytgtcacgacc

SEQ ID NO: 9804 - DNA, 21 bp, Homo sapiens
gtaagattacrtgagaaaact

SEQ ID NO: 9805 - DNA, 21 bp, Homo sapiens
gaagggagggrctcttagaaa

SEQ ID NO: 9806 - DNA, 21 bp, Homo sapiens
tggcatttcargaaataattc

SEQ ID NO: 9807 - DNA, 21 bp, Homo sapiens
atgtttttttrccctgaaaga

SEQ ID NO: 9808 - DNA, 21 bp, Homo sapiens
gaaagggacayaggactatga

SEQ ID NO: 9809 - DNA, 21 bp, Homo sapiens
ggctttcaggrgggcaaggga

SEQ ID NO: 9810 - DNA, 21 bp, Homo sapiens
tatatgtgtcrtgtgtgtgat

SEQ ID NO: 9811 - DNA, 21 bp, Homo sapiens
agaaaagagaytaagcaacta

SEQ ID NO: 9812 - DNA, 21 bp, Homo sapiens
accaccaactrataaaaaatc

SEQ ID NO: 9813 - DNA, 21 bp, Homo sapiens
gaccaaaaatrtaaggcaatt

SEQ ID NO: 9814 - DNA, 21 bp, Homo sapiens
agaaatcatcyggcactcatc

SEQ ID NO: 9815 - DNA, 21 bp, Homo sapiens
attgcagatcrtaagtacaaa

SEQ ID NO: 9816 - DNA, 21 bp, Homo sapiens
ggtgaatatcmattgtatatg

SEQ ID NO: 9817 - DNA, 21 bp, Homo sapiens
tatcaattgtrtatgtgaaag

SEQ ID NO: 9818 - DNA, 21 bp, Homo sapiens
agatgctagcmccatacctac

SEQ ID NO: 9819 - DNA, 21 bp, Homo sapiens
agcagaaattwttgtaattga

SEQ ID NO: 9820 - DNA, 21 bp, Homo sapiens
gaaagacactrttataagaag

SEQ ID NO: 9821 - DNA, 21 bp, Homo sapiens
cctaaacattrtgatgcataa

SEQ ID NO: 9822 - DNA, 21 bp, Homo sapiens
aagcaacaaarccatttagaa

SEQ ID NO: 9823 - DNA, 21 bp, Homo sapiens
aatgaaaatgkcctttactca

SEQ ID NO: 9824 - DNA, 21 bp, Homo sapiens
tttgcatccamcagagcactt

SEQ ID NO: 9825 - DNA, 21 bp, Homo sapiens
cgaagcaaagkttattaaaag

SEQ ID NO: 9826 - DNA, 21 bp, Homo sapiens
actgctcttayggaatagtgt

SEQ ID NO: 9827 - DNA, 21 bp, Homo sapiens
gagactttcarggggtctgcg

SEQ ID NO: 9828 - DNA, 21 bp, Homo sapiens
gtcagtagtakgtaaaatgga

SEQ ID NO: 9829 - DNA, 21 bp, Homo sapiens
aagagatttcrttatttcttt

SEQ ID NO: 9830 - DNA, 21 bp, Homo sapiens
ctgttgtatakaagaagcatc

SEQ ID NO: 9831 - DNA, 21 bp, Homo sapiens
aagacaccttyaagtagcaac

SEQ ID NO: 9832 - DNA, 21 bp, Homo sapiens
aaaaggtctaktctaagtact

SEQ ID NO: 9833 - DNA, 21 bp, Homo sapiens
tgaataaatamatgacatcaa

SEQ ID NO: 9834 - DNA, 21 bp, Homo sapiens
tcaactggatycttttgttct

SEQ ID NO: 9835 - DNA, 21 bp, Homo sapiens
aaatgaatgtytcacttttat

SEQ ID NO: 9836 - DNA, 21 bp, Homo sapiens
cctcaaaattyatatgtcgtc

SEQ ID NO: 9837 - DNA, 21 bp, Homo sapiens
aaaaagagaayagcagttgtt

SEQ ID NO: 9838 - DNA, 21 bp, Homo sapiens
ggtgcctaatrtggacaaaat

SEQ ID NO: 9839 - DNA, 21 bp, Homo sapiens
ttttatttaamcccaaatgcc

SEQ ID NO: 9840 - DNA, 21 bp, Homo sapiens
ttggtggggargggaagagaa

SEQ ID NO: 9841 - DNA, 21 bp, Homo sapiens
attcccaatasagcaacatgc

SEQ ID NO: 9842 - DNA, 21 bp, Homo sapiens
tggagaaaggygaagaaggag

SEQ ID NO: 9843 - DNA, 21 bp, Homo sapiens
acatcattttktaccagtttc

SEQ ID NO: 9844 - DNA, 21 bp, Homo sapiens
ccaaggggtgyatctgtgtat

SEQ ID NO: 9845 - DNA, 21 bp, Homo sapiens
cctctccctckccacgtctac

SEQ ID NO: 9846 - DNA, 21 bp, Homo sapiens
tcatgctctcyaactgctatg

SEQ ID NO: 9847 - DNA, 21 bp, Homo sapiens
atcaaggaaawctgaacatgg

SEQ ID NO: 9848 - DNA, 21 bp, Homo sapiens
ggaagcataargtaccttcaa

SEQ ID NO: 9849 - DNA, 21 bp, Homo sapiens
accagactcayggtcattagg

SEQ ID NO: 9850 - DNA, 21 bp, Homo sapiens
aaagtaatggmaaagtttcaa

SEQ ID NO: 9851 - DNA, 21 bp, Homo sapiens
atgattcttawaattgttggt

SEQ ID NO: 9852 - DNA, 21 bp, Homo sapiens
aaagaccagtwaaaaggctga

SEQ ID NO: 9853 - DNA, 21 bp, Homo sapiens
atcaaataagrtaactgatga

SEQ ID NO: 9854 - DNA, 21 bp, Homo sapiens
ccttggagtgmagaaggcttc

SEQ ID NO: 9855 - DNA, 21 bp, Homo sapiens
cacagaaaagrgtagttccag

SEQ ID NO: 9856 - DNA, 21 bp, Homo sapiens
tggaaagggamaattggtttt

SEQ ID NO: 9857 - DNA, 21 bp, Homo sapiens
ttttgaaaatytgactcttat

SEQ ID NO: 9858 - DNA, 21 bp, Homo sapiens
cattttcctamcctttattac

SEQ ID NO: 9859 - DNA, 21 bp, Homo sapiens
gccaaaaagaycaaattaaga

SEQ ID NO: 9860 - DNA, 21 bp, Homo sapiens
tggtcaatttyagatatcaat

SEQ ID NO: 9861 - DNA, 21 bp, Homo sapiens
gtattacagcyccattttacg

SEQ ID NO: 9862 - DNA, 21 bp, Homo sapiens
tgggagtggaygattgaactt

SEQ ID NO: 9863 - DNA, 21 bp, Homo sapiens
aaattgaaatktgtggtaaat

SEQ ID NO: 9864 - DNA, 21 bp, Homo sapiens
ttccataaatytctagggtag

SEQ ID NO: 9865 - DNA, 21 bp, Homo sapiens
cttattcaggraatcattatt

SEQ ID NO: 9866 - DNA, 21 bp, Homo sapiens
gcactgggtgrgagtggttgc

SEQ ID NO: 9867 - DNA, 21 bp, Homo sapiens
aaaatatcaayaaaaacagaa

SEQ ID NO: 9868 - DNA, 21 bp, Homo sapiens
ttgcttatggwaaaaataatg

SEQ ID NO: 9869 - DNA, 21 bp, Homo sapiens
ttctttttgartaggtgtctc

SEQ ID NO: 9870 - DNA, 21 bp, Homo sapiens
gagaaggacargtaatcatga

SEQ ID NO: 9871 - DNA, 21 bp, Homo sapiens
ggctttagatycggaaagacc

SEQ ID NO: 9872 - DNA, 21 bp, Homo sapiens
actggtccccscaccctgccc

SEQ ID NO: 9873 - DNA, 21 bp, Homo sapiens
gctccttaatktaccattaca

SEQ ID NO: 9874 - DNA, 21 bp, Homo sapiens
gttattcacayattcccttat

SEQ ID NO: 9875 - DNA, 21 bp, Homo sapiens
aaatatatatwcatacaaaca

SEQ ID NO: 9876 - DNA, 21 bp, Homo sapiens
aaatgtggacycttttaaact

SEQ ID NO: 9877 - DNA, 21 bp, Homo sapiens
gcagagatttygtttttaatc

SEQ ID NO: 9878 - DNA, 21 bp, Homo sapiens
taaggctattmcctgtatatt

SEQ ID NO: 9879 - DNA, 21 bp, Homo sapiens
agtctttattrtgttgaggta

SEQ ID NO: 9880 - DNA, 21 bp, Homo sapiens
ttcatatttaraagtgggtcc

SEQ ID NO: 9881 - DNA, 21 bp, Homo sapiens
tagaacataaractgcttcta

SEQ ID NO: 9882 - DNA, 21 bp, Homo sapiens
aattaaaaaamatatttttat

SEQ ID NO: 9883 - DNA, 21 bp, Homo sapiens
tacctttcacrtgtcaacttg

SEQ ID NO: 9884 - DNA, 21 bp, Homo sapiens
agcaaaacctyggaaacaatc

SEQ ID NO: 9885 - DNA, 21 bp, Homo sapiens
ttcctataggsgcccagtggt

SEQ ID NO: 9886 - DNA, 21 bp, Homo sapiens
agaagtgaatyagaaatggtc

SEQ ID NO: 9887 - DNA, 21 bp, Homo sapiens
gtcccgtctcycatttgcaag

SEQ ID NO: 9888 - DNA, 21 bp, Homo sapiens
cttaaatagawccaatgccca

SEQ ID NO: 9889 - DNA, 21 bp, Homo sapiens
ctttatggtaycatttatggc

SEQ ID NO: 9890 - DNA, 21 bp, Homo sapiens
tatgagagtcyttattctctc

SEQ ID NO: 9891 - DNA, 21 bp, Homo sapiens
tggcgacctcytccacagagt

SEQ ID NO: 9892 - DNA, 21 bp, Homo sapiens
agccacagacrgggatgaggc

SEQ ID NO: 9893 - DNA, 21 bp, Homo sapiens
aggttcatagkggccagggta

SEQ ID NO: 9894 - DNA, 21 bp, Homo sapiens
caaatgtaacrtatctccaaa

SEQ ID NO: 9895 - DNA, 21 bp, Homo sapiens
acaataaagaraaaatggtcc

SEQ ID NO: 9896 - DNA, 21 bp, Homo sapiens
caacagtaatkctactttatt

SEQ ID NO: 9897 - DNA, 21 bp, Homo sapiens
aatagttaccrgtgactgaca

SEQ ID NO: 9898 - DNA, 21 bp, Homo sapiens
gaagacaaggyatatgaactc

SEQ ID NO: 9899 - DNA, 21 bp, Homo sapiens
gctcacctcayaggctgtgct

SEQ ID NO: 9900 - DNA, 21 bp, Homo sapiens
gcatgttgggyttaaagtgct

SEQ ID NO: 9901 - DNA, 21 bp, Homo sapiens
tttgagctacsctgggctggg

SEQ ID NO: 9902 - DNA, 21 bp, Homo sapiens
ccctgagtgaragcgaagtgg

SEQ ID NO: 9903 - DNA, 21 bp, Homo sapiens
cctcagcatgscctctgctga

SEQ ID NO: 9904 - DNA, 21 bp, Homo sapiens
gtatgatcackgcgtattttg

SEQ ID NO: 9905 - DNA, 21 bp, Homo sapiens
aaaggaaactrgtattcgttt

SEQ ID NO: 9906 - DNA, 21 bp, Homo sapiens
tggtccttcamcttcattcag

SEQ ID NO: 9907 - DNA, 21 bp, Homo sapiens
cagaggctgtrtggcaggact

SEQ ID NO: 9908 - DNA, 21 bp, Homo sapiens
ccacatcccarttcatatatg

SEQ ID NO: 9909 - DNA, 21 bp, Homo sapiens
tatatattcayggaaaaaata

SEQ ID NO: 9910 - DNA, 21 bp, Homo sapiens
gttatgaagaygttaattctt

SEQ ID NO: 9911 - DNA, 21 bp, Homo sapiens
tcatgacacaygtgatgactt

SEQ ID NO: 9912 - DNA, 21 bp, Homo sapiens
ttgtggcctcrctggtgtggg

SEQ ID NO: 9913 - DNA, 21 bp, Homo sapiens
caaggctcctrtcatctacaa

SEQ ID NO: 9914 - DNA, 21 bp, Homo sapiens
tgaacccaggrttcaggggca

SEQ ID NO: 9915 - DNA, 21 bp, Homo sapiens
cactcaaggcrttaggaaagt

SEQ ID NO: 9916 - DNA, 21 bp, Homo sapiens
aatgatgcagraaaagaagtg

SEQ ID NO: 9917 - DNA, 21 bp, Homo sapiens
gctggagactyccttctgccc

SEQ ID NO: 9918 - DNA, 21 bp, Homo sapiens
ggctgcattcyttttggaaga

SEQ ID NO: 9919 - DNA, 21 bp, Homo sapiens
atttcctttcrttttaaggtt

SEQ ID NO: 9920 - DNA, 21 bp, Homo sapiens
gaggcaacacygcagttgcct

SEQ ID NO: 9921 - DNA, 21 bp, Homo sapiens
gctccagatcwtcctttaggt

SEQ ID NO: 9922 - DNA, 21 bp, Homo sapiens
cccggggccartcatcttgaa

SEQ ID NO: 9923 - DNA, 21 bp, Homo sapiens
agaagtggaarcctttgctga

SEQ ID NO: 9924 - DNA, 21 bp, Homo sapiens
tgctcaggggraaggtggatt

SEQ ID NO: 9925 - DNA, 21 bp, Homo sapiens
cctctcaaacytccctgtgac

SEQ ID NO: 9926 - DNA, 21 bp, Homo sapiens
ctcacattcaragcacacttt

SEQ ID NO: 9927 - DNA, 21 bp, Homo sapiens
ctgtgggtttkgggcgctcac

SEQ ID NO: 9928 - DNA, 21 bp, Homo sapiens
gctccttccgkccaggttgac

SEQ ID NO: 9929 - DNA, 21 bp, Homo sapiens
ccaggccagamctgcagggag

SEQ ID NO: 9930 - DNA, 21 bp, Homo sapiens
agagaggggcwcagtgcccag

SEQ ID NO: 9931 - DNA, 21 bp, Homo sapiens
ggaaatgctgrgaatgacatg

SEQ ID NO: 9932 - DNA, 21 bp, Homo sapiens
ggaaaaggtcyttttaggaac

SEQ ID NO: 9933 - DNA, 21 bp, Homo sapiens
tagctatccargttaagtgcc

SEQ ID NO: 9934 - DNA, 21 bp, Homo sapiens
aatggggagcygaagcctgaa

SEQ ID NO: 9935 - DNA, 21 bp, Homo sapiens
gcactcagcamcttgacctgg

SEQ ID NO: 9936 - DNA, 21 bp, Homo sapiens
atgacggttayaccctgagaa

SEQ ID NO: 9937 - DNA, 21 bp, Homo sapiens
ttcacccagcwagacagtgac

SEQ ID NO: 9938 - DNA, 21 bp, Homo sapiens
agggctctgcscacaaagcta

SEQ ID NO: 9939 - DNA, 21 bp, Homo sapiens
aataaacagcwctgaggcaat

SEQ ID NO: 9940 - DNA, 21 bp, Homo sapiens
aggtgaaggakctaaagctga

SEQ ID NO: 9941 - DNA, 21 bp, Homo sapiens
aaaatagatgrgcaaaaatac

SEQ ID NO: 9942 - DNA, 21 bp, Homo sapiens
gaaagactggytctccatgtc

SEQ ID NO: 9943 - DNA, 21 bp, Homo sapiens
agttttaataygatatgccta

SEQ ID NO: 9944 - DNA, 21 bp, Homo sapiens
atccttgccasatatgggtct

SEQ ID NO: 9945 - DNA, 21 bp, Homo sapiens
ctttaaaaatsggcaaaaata

SEQ ID NO: 9946 - DNA, 21 bp, Homo sapiens
gtatgttatcygaccacaaca

SEQ ID NO: 9947 - DNA, 21 bp, Homo sapiens
acgttgtaacygggaaacaca

SEQ ID NO: 9948 - DNA, 21 bp, Homo sapiens
agtaccagtcycctctggctg

SEQ ID NO: 9949 - DNA, 21 bp, Homo sapiens
tcttccagtcrtctttctatc

SEQ ID NO: 9950 - DNA, 21 bp, Homo sapiens
cacagacagasagacagttgt

SEQ ID NO: 9951 - DNA, 21 bp, Homo sapiens
tgttgtagttwaaacatactt

SEQ ID NO: 9952 - DNA, 21 bp, Homo sapiens
ggaagagtatytaagtcaaat

SEQ ID NO: 9953 - DNA, 21 bp, Homo sapiens
taagagactayatagaataaa

SEQ ID NO: 9954 - DNA, 21 bp, Homo sapiens
taatattttaytctatttctg

SEQ ID NO: 9955 - DNA, 21 bp, Homo sapiens
tgtaagtttcyaaatctgatg

SEQ ID NO: 9956 - DNA, 21 bp, Homo sapiens
aaactactagrtattggtacc

SEQ ID NO: 9957 - DNA, 21 bp, Homo sapiens
tcatatttgastttgatgcct

SEQ ID NO: 9958 - DNA, 21 bp, Homo sapiens
ctgagatttarggattattac

SEQ ID NO: 9959 - DNA, 21 bp, Homo sapiens
cctgcatgaakgtgatgcata

SEQ ID NO: 9960 - DNA, 21 bp, Homo sapiens
ctgccttggcrtttaccagct

SEQ ID NO: 9961 - DNA, 21 bp, Homo sapiens
caagcacaagrgagaccacat

SEQ ID NO: 9962 - DNA, 21 bp, Homo sapiens
ggctgaaatgytcctagaagc

SEQ ID NO: 9963 - DNA, 21 bp, Homo sapiens
acttctctgayggtgtctcag

SEQ ID NO: 9964 - DNA, 21 bp, Homo sapiens
ctggtcacctyggcccctaca

SEQ ID NO: 9965 - DNA, 21 bp, Homo sapiens
ccagagtacgytggtcgtaac

SEQ ID NO: 9966 - DNA, 21 bp, Homo sapiens
ccagccaagcrgccactgatg

SEQ ID NO: 9967 - DNA, 21 bp, Homo sapiens
tgtaagggaawaggtcttaaa

SEQ ID NO: 9968 - DNA, 21 bp, Homo sapiens
ctatcatctayggttcatacc

SEQ ID NO: 9969 - DNA, 21 bp, Homo sapiens
atagtgcctcsgccacctcct

SEQ ID NO: 9970 - DNA, 21 bp, Homo sapiens
cctcctaaaawatctgcagcc

SEQ ID NO: 9971 - DNA, 21 bp, Homo sapiens
cagtagagatwagtcctataa

SEQ ID NO: 9972 - DNA, 21 bp, Homo sapiens
taatccctgascttctagtgc

SEQ ID NO: 9973 - DNA, 21 bp, Homo sapiens
tgaggtgtggrtctccctgca

SEQ ID NO: 9974 - DNA, 21 bp, Homo sapiens
tctattaaacyttcccctcct

SEQ ID NO: 9975 - DNA, 21 bp, Homo sapiens
attcatccagraagagagaat

SEQ ID NO: 9976 - DNA, 21 bp, Homo sapiens
actctttaaayatgatccaaa

SEQ ID NO: 9977 - DNA, 21 bp, Homo sapiens
gctacttctcrgggactgctg

SEQ ID NO: 9978 - DNA, 21 bp, Homo sapiens
gaggttgttcytgtcccaatc

SEQ ID NO: 9979 - DNA, 21 bp, Homo sapiens
ctgctgtcgtyttgggtctgc

SEQ ID NO: 9980 - DNA, 21 bp, Homo sapiens
gtaatcaaccyagagaagcag

SEQ ID NO: 9981 - DNA, 21 bp, Homo sapiens
ttcccattaayggatcacatt

SEQ ID NO: 9982 - DNA, 21 bp, Homo sapiens
ggcctgagggyaggagctggc

SEQ ID NO: 9983 - DNA, 21 bp, Homo sapiens
gcctgcatgcytgcccgacag

SEQ ID NO: 9984 - DNA, 21 bp, Homo sapiens
cagaccccaartccacagggt

SEQ ID NO: 9985 - DNA, 21 bp, Homo sapiens
ggcccagggtsccagtactga

SEQ ID NO: 9986 - DNA, 21 bp, Homo sapiens
tgacttgcacmacaccatgat

SEQ ID NO: 9987 - DNA, 21 bp, Homo sapiens
cctgttagggstccactctgg

SEQ ID NO: 9988 - DNA, 21 bp, Homo sapiens
tgttgggttayatggtaagtg

SEQ ID NO: 9989 - DNA, 21 bp, Homo sapiens
aaggcagtgcyggagtcggcc

SEQ ID NO: 9990 - DNA, 21 bp, Homo sapiens
aactagggggkttttctcggc

SEQ ID NO: 9991 - DNA, 21 bp, Homo sapiens
tttttcttacytttttgttct

SEQ ID NO: 9992 - DNA, 21 bp, Homo sapiens
tcggagcggcwgtgggaagca

SEQ ID NO: 9993 - DNA, 21 bp, Homo sapiens
ttaaaaatagytactacaaaa

SEQ ID NO: 9994 - DNA, 21 bp, Homo sapiens
ggttatgtggygaaggataag

SEQ ID NO: 9995 - DNA, 21 bp, Homo sapiens
ttttaaaagtrtgatgacaat

SEQ ID NO: 9996 - DNA, 21 bp, Homo sapiens
cactgggcccrccatgtcact

SEQ ID NO: 9997 - DNA, 21 bp, Homo sapiens
gggcaaacggycactgcgtgt

SEQ ID NO: 9998 - DNA, 21 bp, Homo sapiens
ttggagccccrtctggcaagc

SEQ ID NO: 9999 - DNA, 21 bp, Homo sapiens
aaaacactaartctgcattga

SEQ ID NO: 10000 - DNA, 21 bp, Homo sapiens
ttcgcttccaycctctggccc

SEQ ID NO: 10001 - DNA, 21 bp, Homo sapiens
ctttccatcaytcccctgaca

SEQ ID NO: 10002 - DNA, 21 bp, Homo sapiens
ttaaaaggcargcatgaatga

SEQ ID NO: 10003 - DNA, 21 bp, Homo sapiens
cctgctcactstgccctaagg

SEQ ID NO: 10004 - DNA, 21 bp, Homo sapiens
gggtgtttatyggtatttatc

SEQ ID NO: 10005 - DNA, 21 bp, Homo sapiens
tcaacctgctyctggtacctg

SEQ ID NO: 10006 - DNA, 21 bp, Homo sapiens
aggtgaagtgrgagttgcatg

SEQ ID NO: 10007 - DNA, 21 bp, Homo sapiens
ggcagttgagktggtgccttc

SEQ ID NO: 10008 - DNA, 21 bp, Homo sapiens
attgtgaaaaygtcaaatagc

SEQ ID NO: 10009 - DNA, 21 bp, Homo sapiens
ggtgtttcagyggcatgttca

SEQ ID NO: 10010 - DNA, 21 bp, Homo sapiens
gattggaatcytcaccctttt

SEQ ID NO: 10011 - DNA, 21 bp, Homo sapiens
atattttgccrgtagatacaa

SEQ ID NO: 10012 - DNA, 21 bp, Homo sapiens
ataggaaattraagataaata

SEQ ID NO: 10013 - DNA, 21 bp, Homo sapiens
ctcttcctctygtactccaca

SEQ ID NO: 10014 - DNA, 21 bp, Homo sapiens
cttgattttgygaaccttgag

SEQ ID NO: 10015 - DNA, 21 bp, Homo sapiens
gtctctcaaakgaaggctact

SEQ ID NO: 10016 - DNA, 21 bp, Homo sapiens
atgaatttacrtttctactac

SEQ ID NO: 10017 - DNA, 21 bp, Homo sapiens
agatttccttrttaaaaatct

SEQ ID NO: 10018 - DNA, 21 bp, Homo sapiens
tattctttacycaacacatta

SEQ ID NO: 10019 - DNA, 21 bp, Homo sapiens
cccaggcccgsaaccttccct

SEQ ID NO: 10020 - DNA, 21 bp, Homo sapiens
ttagaagatgrgagagccctc

SEQ ID NO: 10021 - DNA, 21 bp, Homo sapiens
taggcaggcgyagccagatcc

SEQ ID NO: 10022 - DNA, 21 bp, Homo sapiens
cacaactctargaagaagtag

SEQ ID NO: 10023 - DNA, 21 bp, Homo sapiens
tggaaaaaaamaacaacaaca

SEQ ID NO: 10024 - DNA, 21 bp, Homo sapiens
tctggagacarctgtgatgtc

SEQ ID NO: 10025 - DNA, 21 bp, Homo sapiens
cttttcaccaygggtttcaga

SEQ ID NO: 10026 - DNA, 21 bp, Homo sapiens
agccacctctstgctccacaa

SEQ ID NO: 10027 - DNA, 21 bp, Homo sapiens
ctgatgaacgkaaaattatta

SEQ ID NO: 10028 - DNA, 21 bp, Homo sapiens
gtcctctgtckaagcctgttg

SEQ ID NO: 10029 - DNA, 21 bp, Homo sapiens
ccccatgacaycctctttctt

SEQ ID NO: 10030 - DNA, 21 bp, Homo sapiens
tcttcagctgkgttgcgtgat

SEQ ID NO: 10031 - DNA, 21 bp, Homo sapiens
ttagaggctgwcagaaaattt

SEQ ID NO: 10032 - DNA, 21 bp, Homo sapiens
caattctgatsgttgtttgac

SEQ ID NO: 10033 - DNA, 21 bp, Homo sapiens
ctctcttccaraattacaaaa

SEQ ID NO: 10034 - DNA, 21 bp, Homo sapiens
aggtgttcttyacggggaccc

SEQ ID NO: 10035 - DNA, 21 bp, Homo sapiens
aactcagctaygcatccatgg

SEQ ID NO: 10036 - DNA, 21 bp, Homo sapiens
cctgctttgaygcaaatcatg

SEQ ID NO: 10037 - DNA, 21 bp, Homo sapiens
gggttaagacytattaatctg

SEQ ID NO: 10038 - DNA, 21 bp, Homo sapiens
tatggttttcyaagtagatat

SEQ ID NO: 10039 - DNA, 21 bp, Homo sapiens
ttatagaaaarcaccaaagaa

SEQ ID NO: 10040 - DNA, 21 bp, Homo sapiens
gcatacaactrtaacgtgaca

SEQ ID NO: 10041 - DNA, 21 bp, Homo sapiens
aaactcataaycttgagtcca

SEQ ID NO: 10042 - DNA, 21 bp, Homo sapiens
gaagactgatrataccaaatg

SEQ ID NO: 10043 - DNA, 21 bp, Homo sapiens
cggctgggctycacaccagta

SEQ ID NO: 10044 - DNA, 21 bp, Homo sapiens
tgaaaatgcaygtattttgta

SEQ ID NO: 10045 - DNA, 21 bp, Homo sapiens
tacctccctcsgggtctccct

SEQ ID NO: 10046 - DNA, 21 bp, Homo sapiens
ctcttttagckgccgagacag

SEQ ID NO: 10047 - DNA, 21 bp, Homo sapiens
ggggtggggcrgggcaaggta

SEQ ID NO: 10048 - DNA, 21 bp, Homo sapiens
ggaagcatggrtatgagtatg

SEQ ID NO: 10049 - DNA, 21 bp, Homo sapiens
cacactcaccwcggagacccc

SEQ ID NO: 10050 - DNA, 21 bp, Homo sapiens
agcacataagktcctttaata

SEQ ID NO: 10051 - DNA, 21 bp, Homo sapiens
ttacctttgcsagggttgcaa

SEQ ID NO: 10052 - DNA, 21 bp, Homo sapiens
actcctcagamtcttctcaaa

SEQ ID NO: 10053 - DNA, 21 bp, Homo sapiens
tgttatgtacratgtaagcag

SEQ ID NO: 10054 - DNA, 21 bp, Homo sapiens
aggatgttccygccactatca

SEQ ID NO: 10055 - DNA, 21 bp, Homo sapiens
ctctgcaggcytgtgtcttac

SEQ ID NO: 10056 - DNA, 21 bp, Homo sapiens
acagtacatayggtttctggg

SEQ ID NO: 10057 - DNA, 21 bp, Homo sapiens
gagggagcatygccccgaagg

SEQ ID NO: 10058 - DNA, 21 bp, Homo sapiens
gacaatgcaarcagccaggtg

SEQ ID NO: 10059 - DNA, 21 bp, Homo sapiens
ggagttctgakcatcttttct

SEQ ID NO: 10060 - DNA, 21 bp, Homo sapiens
gtaagatctamcccacaggac

SEQ ID NO: 10061 - DNA, 21 bp, Homo sapiens
ttccttcaccscagctctccc

SEQ ID NO: 10062 - DNA, 21 bp, Homo sapiens
ggcttctcggkctttgtgggg

SEQ ID NO: 10063 - DNA, 21 bp, Homo sapiens
cacttccttcyctccccaggg

SEQ ID NO: 10064 - DNA, 21 bp, Homo sapiens
agcaaaagccrttatttcttc

SEQ ID NO: 10065 - DNA, 21 bp, Homo sapiens
ctgcagtgggrcaagtgtgga

SEQ ID NO: 10066 - DNA, 21 bp, Homo sapiens
taaagtactamtatgaaaatg

SEQ ID NO: 10067 - DNA, 21 bp, Homo sapiens
aggaattgaayttaatagatt

SEQ ID NO: 10068 - DNA, 21 bp, Homo sapiens
ttaatatgatraaatgctcaa

SEQ ID NO: 10069 - DNA, 21 bp, Homo sapiens
tcccctacccmagcccaactc

SEQ ID NO: 10070 - DNA, 21 bp, Homo sapiens
aggtccagggrgcccccgcca

SEQ ID NO: 10071 - DNA, 21 bp, Homo sapiens
tcaccggtctrtctgtctacc

SEQ ID NO: 10072 - DNA, 21 bp, Homo sapiens
gataataactyctggcaggca

SEQ ID NO: 10073 - DNA, 21 bp, Homo sapiens
acctggtccasggtcctgacc

SEQ ID NO: 10074 - DNA, 21 bp, Homo sapiens
ttatccactckgtgttcatta

SEQ ID NO: 10075 - DNA, 21 bp, Homo sapiens
tttaacagaaygtttgctggt

SEQ ID NO: 10076 - DNA, 21 bp, Homo sapiens
gttacattggygggtaacatc

SEQ ID NO: 10077 - DNA, 21 bp, Homo sapiens
gaccagagacragcaatatct

SEQ ID NO: 10078 - DNA, 21 bp, Homo sapiens
gcctttgtggrctccaggtcc

SEQ ID NO: 10079 - DNA, 21 bp, Homo sapiens
actatgttttygttacgtatt

SEQ ID NO: 10080 - DNA, 21 bp, Homo sapiens
ttctggtgctrgatcatgtcc

SEQ ID NO: 10081 - DNA, 21 bp, Homo sapiens
aaagttaacargcatccaaag

SEQ ID NO: 10082 - DNA, 21 bp, Homo sapiens
aaatctgagcractatttcag

SEQ ID NO: 10083 - DNA, 21 bp, Homo sapiens
cctccactatsaacatttgat

SEQ ID NO: 10084 - DNA, 21 bp, Homo sapiens
ctacctctcayccagcagcaa

SEQ ID NO: 10085 - DNA, 21 bp, Homo sapiens
gaacaggattrtgagaggaag

SEQ ID NO: 10086 - DNA, 21 bp, Homo sapiens
atcttattgtyatcttgtctc

SEQ ID NO: 10087 - DNA, 21 bp, Homo sapiens
cttgttggatrcaaacagtaa

SEQ ID NO: 10088 - DNA, 21 bp, Homo sapiens
gaaccagggtkagagccagat

SEQ ID NO: 10089 - DNA, 21 bp, Homo sapiens
tctgataggtratgaggagcc

SEQ ID NO: 10090 - DNA, 21 bp, Homo sapiens
gtcaggttgayttcaaattcc

SEQ ID NO: 10091 - DNA, 21 bp, Homo sapiens
gctgatttgaraactagcagg

SEQ ID NO: 10092 - DNA, 21 bp, Homo sapiens
ctgtttgctcrtttgaaatat

SEQ ID NO: 10093 - DNA, 21 bp, Homo sapiens
atttccttatsacaaactgtg

SEQ ID NO: 10094 - DNA, 21 bp, Homo sapiens
cctaacagtcrcttatttacg

SEQ ID NO: 10095 - DNA, 21 bp, Homo sapiens
agaactttatyactgaagaag

SEQ ID NO: 10096 - DNA, 21 bp, Homo sapiens
tctgtaagaaycttgttgatg

SEQ ID NO: 10097 - DNA, 21 bp, Homo sapiens
cagcttctacyccagacctcg

SEQ ID NO: 10098 - DNA, 21 bp, Homo sapiens
atttaggcttrttaaggaaca

SEQ ID NO: 10099 - DNA, 21 bp, Homo sapiens
tttgtatgttrtctatttgta

SEQ ID NO: 10100 - DNA, 21 bp, Homo sapiens
gtcactgattkcattgaatct

SEQ ID NO: 10101 - DNA, 21 bp, Homo sapiens
tcagctactawtattacactc

SEQ ID NO: 10102 - DNA, 21 bp, Homo sapiens
tggctccagayagtccctttc

SEQ ID NO: 10103 - DNA, 21 bp, Homo sapiens
gtgttgtagayaatacgaact

SEQ ID NO: 10104 - DNA, 21 bp, Homo sapiens
agaaggcatgkacctcatgaa

SEQ ID NO: 10105 - DNA, 21 bp, Homo sapiens
taaattccaartgaaaacaat

SEQ ID NO: 10106 - DNA, 21 bp, Homo sapiens
agacctggaartctgaacttt

SEQ ID NO: 10107 - DNA, 21 bp, Homo sapiens
gttctactcaygtgctgacct

SEQ ID NO: 10108 - DNA, 21 bp, Homo sapiens
agcagtggacmccaggagtcc

SEQ ID NO: 10109 - DNA, 21 bp, Homo sapiens
ccctgcccagmccagggccct

SEQ ID NO: 10110 - DNA, 21 bp, Homo sapiens
caaacgcagtrctcataactg

SEQ ID NO: 10111 - DNA, 21 bp, Homo sapiens
gggaaggttcygggagaaaag

SEQ ID NO: 10112 - DNA, 21 bp, Homo sapiens
tagttggagckatttcctatt

SEQ ID NO: 10113 - DNA, 21 bp, Homo sapiens
tctcaatcccmtgttctctaa

SEQ ID NO: 10114 - DNA, 21 bp, Homo sapiens
ccaggaagccrttgaggacac

SEQ ID NO: 10115 - DNA, 21 bp, Homo sapiens
gttttgtatgstcactgcaca

SEQ ID NO: 10116 - DNA, 21 bp, Homo sapiens
acaatctgatsttctgataac

SEQ ID NO: 10117 - DNA, 21 bp, Homo sapiens
taccaaaatawtctgatcaca

SEQ ID NO: 10118 - DNA, 21 bp, Homo sapiens
tattactcagragcctaagaa

SEQ ID NO: 10119 - DNA, 21 bp, Homo sapiens
tactggaccaygttcctcccc

SEQ ID NO: 10120 - DNA, 21 bp, Homo sapiens
atcatgaattmatctcaattc

SEQ ID NO: 10121 - DNA, 21 bp, Homo sapiens
cactgattatytgattaacag

SEQ ID NO: 10122 - DNA, 21 bp, Homo sapiens
tctatattctkatcataataa

SEQ ID NO: 10123 - DNA, 21 bp, Homo sapiens
ctccatatcaygtttgcaagt

SEQ ID NO: 10124 - DNA, 21 bp, Homo sapiens
agtatgcactyaccgttaaca

SEQ ID NO: 10125 - DNA, 21 bp, Homo sapiens
tatatctatcrtcaagtcaca

SEQ ID NO: 10126 - DNA, 21 bp, Homo sapiens
gaccatgtcaytggcaataac

SEQ ID NO: 10127 - DNA, 21 bp, Homo sapiens
tcctcaactawtactactcta

SEQ ID NO: 10128 - DNA, 21 bp, Homo sapiens
ggaaattttgrggatgacaag

SEQ ID NO: 10129 - DNA, 21 bp, Homo sapiens
tctctctcatycctctcagac

SEQ ID NO: 10130 - DNA, 21 bp, Homo sapiens
agccaagtttrtatttataat

SEQ ID NO: 10131 - DNA, 21 bp, Homo sapiens
atcttgatttyctgcaggctt

SEQ ID NO: 10132 - DNA, 21 bp, Homo sapiens
aaccgcagacscggtccccgc

SEQ ID NO: 10133 - DNA, 21 bp, Homo sapiens
cttggtactcraatgtttact

SEQ ID NO: 10134 - DNA, 21 bp, Homo sapiens
gtgaggtgacscacaaggctc

SEQ ID NO: 10135 - DNA, 21 bp, Homo sapiens
caagtagagcygagctatgcc

SEQ ID NO: 10136 - DNA, 21 bp, Homo sapiens
atgcaggattygcttgggagt

SEQ ID NO: 10137 - DNA, 21 bp, Homo sapiens
atgtgggcackaggggtaaga

SEQ ID NO: 10138 - DNA, 21 bp, Homo sapiens
ctgagactctraggcctcctc

SEQ ID NO: 10139 - DNA, 21 bp, Homo sapiens
tgagctctacwtatgcaatga

SEQ ID NO: 10140 - DNA, 21 bp, Homo sapiens
ttacatagggrgccagtcctc

SEQ ID NO: 10141 - DNA, 21 bp, Homo sapiens
cccactggccycatcccaggt

SEQ ID NO: 10142 - DNA, 21 bp, Homo sapiens
aagccctggaratgagaatct

SEQ ID NO: 10143 - DNA, 21 bp, Homo sapiens
tagggctgcgytataataggg

SEQ ID NO: 10144 - DNA, 21 bp, Homo sapiens
acctagttctyccttgttctc

SEQ ID NO: 10145 - DNA, 21 bp, Homo sapiens
tggaatgggasgtgggaaagg

SEQ ID NO: 10146 - DNA, 21 bp, Homo sapiens
tttaggtgtgytaatggtata

SEQ ID NO: 10147 - DNA, 21 bp, Homo sapiens
atgccactcayatttcaggat

SEQ ID NO: 10148 - DNA, 21 bp, Homo sapiens
tatttctaccygtcatctcta

SEQ ID NO: 10149 - DNA, 21 bp, Homo sapiens
taattcagacrgtgtcccaca

SEQ ID NO: 10150 - DNA, 21 bp, Homo sapiens
aagtttaagtraggtatttgt

SEQ ID NO: 10151 - DNA, 21 bp, Homo sapiens
cttgttttctyagctactaca

SEQ ID NO: 10152 - DNA, 21 bp, Homo sapiens
ttctgtttccrgctttgtcca

SEQ ID NO: 10153 - DNA, 21 bp, Homo sapiens
actgcgcgccrgtttcgggca

SEQ ID NO: 10154 - DNA, 21 bp, Homo sapiens
tgcactgatcraatccgtatt

SEQ ID NO: 10155 - DNA, 21 bp, Homo sapiens
gcctggcccaygcttgtgcct

SEQ ID NO: 10156 - DNA, 21 bp, Homo sapiens
gatcaccaaayacaagatgtt

SEQ ID NO: 10157 - DNA, 21 bp, Homo sapiens
cagctggagckctaggcttta

SEQ ID NO: 10158 - DNA, 21 bp, Homo sapiens
gagccacagamcttgctgttc

SEQ ID NO: 10159 - DNA, 21 bp, Homo sapiens
tatattagagrtcagaaacct

SEQ ID NO: 10160 - DNA, 21 bp, Homo sapiens
ggtgttcttcmatttggtgta

SEQ ID NO: 10161 - DNA, 21 bp, Homo sapiens
tataaaggaamcctcacgcac

SEQ ID NO: 10162 - DNA, 21 bp, Homo sapiens
aaaatcgtatraggaagggac

SEQ ID NO: 10163 - DNA, 21 bp, Homo sapiens
cttcagattamttattccaag

SEQ ID NO: 10164 - DNA, 21 bp, Homo sapiens
tccaaaaatcractagtaaat

SEQ ID NO: 10165 - DNA, 21 bp, Homo sapiens
acaacccaaarttggatctgg

SEQ ID NO: 10166 - DNA, 21 bp, Homo sapiens
tgcctgctctytagtcctagt

SEQ ID NO: 10167 - DNA, 21 bp, Homo sapiens
gcttgaaaatsagtcaacaca

SEQ ID NO: 10168 - DNA, 21 bp, Homo sapiens
agccttcgatrtgtgtccctg

SEQ ID NO: 10169 - DNA, 21 bp, Homo sapiens
cacctttaacrtatcctcatt

SEQ ID NO: 10170 - DNA, 21 bp, Homo sapiens
tgctccatttracctttcttt

SEQ ID NO: 10171 - DNA, 21 bp, Homo sapiens
agtccaatcartctccttact

SEQ ID NO: 10172 - DNA, 21 bp, Homo sapiens
gaaggattcaytttgtatact

SEQ ID NO: 10173 - DNA, 21 bp, Homo sapiens
ttttgatccaytgcccattac

SEQ ID NO: 10174 - DNA, 21 bp, Homo sapiens
tttcggctacmatcatatgcc

SEQ ID NO: 10175 - DNA, 21 bp, Homo sapiens
agaaaagacartgtatgtgcc

SEQ ID NO: 10176 - DNA, 21 bp, Homo sapiens
ctgacttaccrccttcacagt

SEQ ID NO: 10177 - DNA, 21 bp, Homo sapiens
ggctgaggtcrcctattttag

SEQ ID NO: 10178 - DNA, 21 bp, Homo sapiens
agctggctatragccagcaat

SEQ ID NO: 10179 - DNA, 21 bp, Homo sapiens
aaaaccagaayggtttcctaa

SEQ ID NO: 10180 - DNA, 21 bp, Homo sapiens
gacagtttctsgaatttgttt

SEQ ID NO: 10181 - DNA, 21 bp, Homo sapiens
cagaggtatayggtaaagccc

SEQ ID NO: 10182 - DNA, 21 bp, Homo sapiens
ttaaatatatktatgaatgac

SEQ ID NO: 10183 - DNA, 21 bp, Homo sapiens
gaatgacaacratgtacatat

SEQ ID NO: 10184 - DNA, 21 bp, Homo sapiens
ttttttttttwaaatcaagag

SEQ ID NO: 10185 - DNA, 21 bp, Homo sapiens
attactgtaaratttgaccag

SEQ ID NO: 10186 - DNA, 21 bp, Homo sapiens
attaaggcaasgaagcagtgt

SEQ ID NO: 10187 - DNA, 21 bp, Homo sapiens
agctgggtttyggtaatggtt

SEQ ID NO: 10188 - DNA, 21 bp, Homo sapiens
tttcaatcttkaaagaatacc

SEQ ID NO: 10189 - DNA, 21 bp, Homo sapiens
aacacagtagyatttgtgcca

SEQ ID NO: 10190 - DNA, 21 bp, Homo sapiens
cagtactgttyaatggaagcg

SEQ ID NO: 10191 - DNA, 21 bp, Homo sapiens
ctagttcgtcmctaagcggcc

SEQ ID NO: 10192 - DNA, 21 bp, Homo sapiens
ttaaaactttmaagatatgat

SEQ ID NO: 10193 - DNA, 21 bp, Homo sapiens
aaaattattaygcatccctca

SEQ ID NO: 10194 - DNA, 21 bp, Homo sapiens
gccacggcagkacagggcctg

SEQ ID NO: 10195 - DNA, 21 bp, Homo sapiens
agatgaaaaasaagaaaagtc

SEQ ID NO: 10196 - DNA, 21 bp, Homo sapiens
agtacacgggraaaaaaaggg

SEQ ID NO: 10197 - DNA, 21 bp, Homo sapiens
catgagaattkttagtaattt

SEQ ID NO: 10198 - DNA, 21 bp, Homo sapiens
agtcaacatcygcttttcagc

SEQ ID NO: 10199 - DNA, 21 bp, Homo sapiens
actgcaagtgrtgcaacctat

SEQ ID NO: 10200 - DNA, 21 bp, Homo sapiens
aacttaggctsatatagctgt

SEQ ID NO: 10201 - DNA, 21 bp, Homo sapiens
gacagaaagamtaacccagag

SEQ ID NO: 10202 - DNA, 21 bp, Homo sapiens
atgacaatgartaagttattc

SEQ ID NO: 10203 - DNA, 21 bp, Homo sapiens
tttaaaaattktcagtcacaa

SEQ ID NO: 10204 - DNA, 21 bp, Homo sapiens
agggtgttggsggtgggggtc

SEQ ID NO: 10205 - DNA, 21 bp, Homo sapiens
atgttgaagarggagtagtgg

SEQ ID NO: 10206 - DNA, 21 bp, Homo sapiens
ttggcggaggrgcataaatca

SEQ ID NO: 10207 - DNA, 21 bp, Homo sapiens
ctgctttcctyaatttatttc

SEQ ID NO: 10208 - DNA, 21 bp, Homo sapiens
caaattgcagstgaaccaaaa

SEQ ID NO: 10209 - DNA, 21 bp, Homo sapiens
aagagtttttmaatcctcacc

SEQ ID NO: 10210 - DNA, 21 bp, Homo sapiens
ttaactgccargcagaagtgt

SEQ ID NO: 10211 - DNA, 21 bp, Homo sapiens
ctccactcacygtaagatcag

SEQ ID NO: 10212 - DNA, 21 bp, Homo sapiens
cctgccccgaraagagcagaa

SEQ ID NO: 10213 - DNA, 21 bp, Homo sapiens
ctgagttgttkcagataaaaa

SEQ ID NO: 10214 - DNA, 21 bp, Homo sapiens
ttttatttttrttgtatagat

SEQ ID NO: 10215 - DNA, 21 bp, Homo sapiens
gctatgcatasacttataaaa

SEQ ID NO: 10216 - DNA, 21 bp, Homo sapiens
cacagtgttcragatctttta

SEQ ID NO: 10217 - DNA, 21 bp, Homo sapiens
gttgggagccrtgagtggtgc

SEQ ID NO: 10218 - DNA, 21 bp, Homo sapiens
gctttgccacygaatctcctc

SEQ ID NO: 10219 - DNA, 21 bp, Homo sapiens
catctgtttcraaatcgattg

SEQ ID NO: 10220 - DNA, 21 bp, Homo sapiens
gggatagcacrtgtgaatagt

SEQ ID NO: 10221 - DNA, 21 bp, Homo sapiens
aaaagttcacrctgctgaaag

SEQ ID NO: 10222 - DNA, 21 bp, Homo sapiens
tcactctctcrggttctagag

SEQ ID NO: 10223 - DNA, 21 bp, Homo sapiens
aatacttacayattgttaaaa

SEQ ID NO: 10224 - DNA, 21 bp, Homo sapiens
gctagcgtgtytgaatgtttg

SEQ ID NO: 10225 - DNA, 21 bp, Homo sapiens
acagatcaacwtacaaaaatc

SEQ ID NO: 10226 - DNA, 21 bp, Homo sapiens
catgaataaamcttaaaaact

SEQ ID NO: 10227 - DNA, 21 bp, Homo sapiens
cttgctctgcsgagaggaaaa

SEQ ID NO: 10228 - DNA, 21 bp, Homo sapiens
tacatacttaytctcacttga

SEQ ID NO: 10229 - DNA, 21 bp, Homo sapiens
ttttttctcakttatcaggta

SEQ ID NO: 10230 - DNA, 21 bp, Homo sapiens
ggaactatttmgacaaagatt

SEQ ID NO: 10231 - DNA, 21 bp, Homo sapiens
ctaaggaagcrctcccaagcc

SEQ ID NO: 10232 - DNA, 21 bp, Homo sapiens
aaggaagaacrtactatttga

SEQ ID NO: 10233 - DNA, 21 bp, Homo sapiens
ttcatgctttyggcttggaaa

SEQ ID NO: 10234 - DNA, 21 bp, Homo sapiens
gtggaaggagkctttccccag

SEQ ID NO: 10235 - DNA, 21 bp, Homo sapiens
aagcacttacyagacaaacct

SEQ ID NO: 10236 - DNA, 21 bp, Homo sapiens
ctatggactaygtggattttt

SEQ ID NO: 10237 - DNA, 21 bp, Homo sapiens
gcacatgcagrataaattaac

SEQ ID NO: 10238 - DNA, 21 bp, Homo sapiens
atatttgaggytgtggcaatc

SEQ ID NO: 10239 - DNA, 21 bp, Homo sapiens
ttctttttaawctctttatgg

SEQ ID NO: 10240 - DNA, 21 bp, Homo sapiens
ttattttgcaygattaataat

SEQ ID NO: 10241 - DNA, 21 bp, Homo sapiens
tgccaaaggaragtctcattt

SEQ ID NO: 10242 - DNA, 21 bp, Homo sapiens
ttgcttggctyaggtgctcac

SEQ ID NO: 10243 - DNA, 21 bp, Homo sapiens
gtcaggagggragctcagtcc

SEQ ID NO: 10244 - DNA, 21 bp, Homo sapiens
atgttcatatstaagaataat

SEQ ID NO: 10245 - DNA, 21 bp, Homo sapiens
attaaagttcytgggctctgt

SEQ ID NO: 10246 - DNA, 21 bp, Homo sapiens
caaggatatgractcctttat

SEQ ID NO: 10247 - DNA, 21 bp, Homo sapiens
actgggtcatrgcccaaatat

SEQ ID NO: 10248 - DNA, 21 bp, Homo sapiens
gctccaagatsattgtgcttt

SEQ ID NO: 10249 - DNA, 21 bp, Homo sapiens
ctttttttttwaaatctcttc

SEQ ID NO: 10250 - DNA, 21 bp, Homo sapiens
ttacatttgartggactctgg

SEQ ID NO: 10251 - DNA, 21 bp, Homo sapiens
ttttgctgtarctggtcttct

SEQ ID NO: 10252 - DNA, 21 bp, Homo sapiens
ccacttgcatyacatcaaacg

SEQ ID NO: 10253 - DNA, 21 bp, Homo sapiens
aggttttgggstggagaatgg

SEQ ID NO: 10254 - DNA, 21 bp, Homo sapiens
gaatccactcytccaggcaat

SEQ ID NO: 10255 - DNA, 21 bp, Homo sapiens
gataggaaagrgactgtagca

SEQ ID NO: 10256 - DNA, 21 bp, Homo sapiens
aatttgttagyagtggattag

SEQ ID NO: 10257 - DNA, 21 bp, Homo sapiens
tcactgtcacygtgttcagtc

SEQ ID NO: 10258 - DNA, 21 bp, Homo sapiens
tcagaagttaytatatttttg

SEQ ID NO: 10259 - DNA, 21 bp, Homo sapiens
aagttagtggsggggagtggt

SEQ ID NO: 10260 - DNA, 21 bp, Homo sapiens
tacctgtgaamgtcttgtcta

SEQ ID NO: 10261 - DNA, 21 bp, Homo sapiens
gtgacacatcytccttcctga

SEQ ID NO: 10262 - DNA, 21 bp, Homo sapiens
gagaactaagkcactctgtca

SEQ ID NO: 10263 - DNA, 21 bp, Homo sapiens
aagaaacgacygtgttagtgg

SEQ ID NO: 10264 - DNA, 21 bp, Homo sapiens
acctacttgcrtactccttag

SEQ ID NO: 10265 - DNA, 21 bp, Homo sapiens
tcattgaattwttgtcctttt

SEQ ID NO: 10266 - DNA, 21 bp, Homo sapiens
cctgtagaaasctaccacatt

SEQ ID NO: 10267 - DNA, 21 bp, Homo sapiens
tcatgacaagrtgattattat

SEQ ID NO: 10268 - DNA, 21 bp, Homo sapiens
caaacttgtgscttattactg

SEQ ID NO: 10269 - DNA, 21 bp, Homo sapiens
tagatctctarcctggttttt

SEQ ID NO: 10270 - DNA, 21 bp, Homo sapiens
gggaaggactsttcttctatt

SEQ ID NO: 10271 - DNA, 21 bp, Homo sapiens
ttaaaaatacrgtgcttttaa

SEQ ID NO: 10272 - DNA, 21 bp, Homo sapiens
aatcacatagrgacagatggt

SEQ ID NO: 10273 - DNA, 21 bp, Homo sapiens
tgatttctttyggtacttaag

SEQ ID NO: 10274 - DNA, 21 bp, Homo sapiens
atcaagagtgraattgggagg

SEQ ID NO: 10275 - DNA, 21 bp, Homo sapiens
caaagcctatsaggaaacata

SEQ ID NO: 10276 - DNA, 21 bp, Homo sapiens
ctcttcaaggraagctgttgt

SEQ ID NO: 10277 - DNA, 21 bp, Homo sapiens
gttatgagtgrggcagcagca

SEQ ID NO: 10278 - DNA, 21 bp, Homo sapiens
gagcagggcartatctctact

SEQ ID NO: 10279 - DNA, 21 bp, Homo sapiens
acatctcttcrtgtgcccagt

SEQ ID NO: 10280 - DNA, 21 bp, Homo sapiens
agtcataaggrgtcagtgcaa

SEQ ID NO: 10281 - DNA, 21 bp, Homo sapiens
ctgataaatayatgcccatgt

SEQ ID NO: 10282 - DNA, 21 bp, Homo sapiens
ctctggacccwcttaattcat

SEQ ID NO: 10283 - DNA, 21 bp, Homo sapiens
tgtgaagatarctgtgaaaat

SEQ ID NO: 10284 - DNA, 21 bp, Homo sapiens
tgctaaagtawagaaatgtat

SEQ ID NO: 10285 - DNA, 21 bp, Homo sapiens
caagctaattytgaatatagg

SEQ ID NO: 10286 - DNA, 21 bp, Homo sapiens
aaaagagtgargctttatgtt

SEQ ID NO: 10287 - DNA, 21 bp, Homo sapiens
caatttgaatkgttaaaatct

SEQ ID NO: 10288 - DNA, 21 bp, Homo sapiens
ttttccagttktataggaaac

SEQ ID NO: 10289 - DNA, 21 bp, Homo sapiens
cacttggtccwctaactccca

SEQ ID NO: 10290 - DNA, 21 bp, Homo sapiens
aaactttctgmaatgatggaa

SEQ ID NO: 10291 - DNA, 21 bp, Homo sapiens
tgtcacaacakagcaaatgca

SEQ ID NO: 10292 - DNA, 21 bp, Homo sapiens
actccaaatcrattaaagcta

SEQ ID NO: 10293 - DNA, 21 bp, Homo sapiens
ccagattcttyccacaggaac

SEQ ID NO: 10294 - DNA, 21 bp, Homo sapiens
tctggagaaartaatgcctgc

SEQ ID NO: 10295 - DNA, 21 bp, Homo sapiens
ccgctgtttaygctccaatca

SEQ ID NO: 10296 - DNA, 21 bp, Homo sapiens
taatatttttwaaatggataa

SEQ ID NO: 10297 - DNA, 21 bp, Homo sapiens
tataaaggtgmcttcaaattg

SEQ ID NO: 10298 - DNA, 21 bp, Homo sapiens
gtcattattawttttatttga

SEQ ID NO: 10299 - DNA, 21 bp, Homo sapiens
tggactgtgcraaaagaaaca

SEQ ID NO: 10300 - DNA, 21 bp, Homo sapiens
aaagagctgcrttgctccttt

SEQ ID NO: 10301 - DNA, 21 bp, Homo sapiens
cagtaccacayctggcaagaa

SEQ ID NO: 10302 - DNA, 21 bp, Homo sapiens
tattttcaccwttgatttctt

SEQ ID NO: 10303 - DNA, 21 bp, Homo sapiens
ctttccctttytgcaatgcta

SEQ ID NO: 10304 - DNA, 21 bp, Homo sapiens
acaacacatgwgaatttccct

SEQ ID NO: 10305 - DNA, 21 bp, Homo sapiens
tgtttccttcyctttccaatc

SEQ ID NO: 10306 - DNA, 21 bp, Homo sapiens
tcagatatttsctcctaacat

SEQ ID NO: 10307 - DNA, 21 bp, Homo sapiens
gtgccccatarttttcttttg

SEQ ID NO: 10308 - DNA, 21 bp, Homo sapiens
ggtggaaatgrgacttgagat

SEQ ID NO: 10309 - DNA, 21 bp, Homo sapiens
aacaaaaaacrcaattggcat

SEQ ID NO: 10310 - DNA, 21 bp, Homo sapiens
accaacctacscccctcaact

SEQ ID NO: 10311 - DNA, 21 bp, Homo sapiens
actatggcatmgattggatat

SEQ ID NO: 10312 - DNA, 21 bp, Homo sapiens
ggggaatattyggcatgagtt

SEQ ID NO: 10313 - DNA, 21 bp, Homo sapiens
cctgacaggcyatttctaagc

SEQ ID NO: 10314 - DNA, 21 bp, Homo sapiens
tctaccatacsatatgaaatg

SEQ ID NO: 10315 - DNA, 21 bp, Homo sapiens
ggctgagctgyaggactatta

SEQ ID NO: 10316 - DNA, 21 bp, Homo sapiens
ataaaccgggrgttcccacac

SEQ ID NO: 10317 - DNA, 21 bp, Homo sapiens
ttgtagtgaaygtaaagtgct

SEQ ID NO: 10318 - DNA, 21 bp, Homo sapiens
aaaaaaaaaawgggatgacaa

SEQ ID NO: 10319 - DNA, 21 bp, Homo sapiens
tccatacactmgagtctcatt

SEQ ID NO: 10320 - DNA, 21 bp, Homo sapiens
gggaacttagmaggcctgcgg

SEQ ID NO: 10321 - DNA, 21 bp, Homo sapiens
tcctctaagayggtgaagcct

SEQ ID NO: 10322 - DNA, 21 bp, Homo sapiens
atacatttagrcctccaggga

SEQ ID NO: 10323 - DNA, 21 bp, Homo sapiens
gttcctttctktaggactggt

SEQ ID NO: 10324 - DNA, 21 bp, Homo sapiens
aaacaatatgmgctattattt

SEQ ID NO: 10325 - DNA, 21 bp, Homo sapiens
cctaaacagargtgacatgtt

SEQ ID NO: 10326 - DNA, 21 bp, Homo sapiens
ctgacactctstgccaaactg

SEQ ID NO: 10327 - DNA, 21 bp, Homo sapiens
acataagacayggctgcagtc

SEQ ID NO: 10328 - DNA, 21 bp, Homo sapiens
acagcaaatarcacactctat

SEQ ID NO: 10329 - DNA, 21 bp, Homo sapiens
caagtcaaatmctattctttc

SEQ ID NO: 10330 - DNA, 21 bp, Homo sapiens
ttctaacaaaraggctttgcc

SEQ ID NO: 10331 - DNA, 21 bp, Homo sapiens
tctgtcatttkactatgtact

SEQ ID NO: 10332 - DNA, 21 bp, Homo sapiens
ttaaatacatytgtttatcaa

SEQ ID NO: 10333 - DNA, 21 bp, Homo sapiens
tctagaaatgwtctgatcaaa

SEQ ID NO: 10334 - DNA, 21 bp, Homo sapiens
tgtgcattctmatgatttaaa

SEQ ID NO: 10335 - DNA, 21 bp, Homo sapiens
agcattatcckggaggccaag

SEQ ID NO: 10336 - DNA, 21 bp, Homo sapiens
acaatgctgcrgtggcattta

SEQ ID NO: 10337 - DNA, 21 bp, Homo sapiens
ttccctggacmaactcattga

SEQ ID NO: 10338 - DNA, 21 bp, Homo sapiens
tagtggcctgkctgatagccc

SEQ ID NO: 10339 - DNA, 21 bp, Homo sapiens
gctgaaggggrcatacaacat

SEQ ID NO: 10340 - DNA, 21 bp, Homo sapiens
agatgggaacmcaagagaaga

SEQ ID NO: 10341 - DNA, 21 bp, Homo sapiens
catcctatttrgtgtcacatt

SEQ ID NO: 10342 - DNA, 21 bp, Homo sapiens
atatttgaagwtgcagacctc

SEQ ID NO: 10343 - DNA, 21 bp, Homo sapiens
ctatgtatggyctctattgat

SEQ ID NO: 10344 - DNA, 21 bp, Homo sapiens
ctgcaaaacaytgccagatac

SEQ ID NO: 10345 - DNA, 21 bp, Homo sapiens
aaatttgcaarcagcatgcat

SEQ ID NO: 10346 - DNA, 21 bp, Homo sapiens
aaagaatagamaaatacatcg

SEQ ID NO: 10347 - DNA, 21 bp, Homo sapiens
atccagtatgwttgtcttgca

SEQ ID NO: 10348 - DNA, 21 bp, Homo sapiens
gctaattgcastttattgatt

SEQ ID NO: 10349 - DNA, 21 bp, Homo sapiens
ctcagctctaygaaatacgtg

SEQ ID NO: 10350 - DNA, 21 bp, Homo sapiens
ttgctttttayagaggactca

SEQ ID NO: 10351 - DNA, 21 bp, Homo sapiens
caaacttaagygttgaggcag

SEQ ID NO: 10352 - DNA, 21 bp, Homo sapiens
aggcaaggaakaaggaaaggt

SEQ ID NO: 10353 - DNA, 21 bp, Homo sapiens
agagttaggaygtttgtgtac

SEQ ID NO: 10354 - DNA, 21 bp, Homo sapiens
aatctaaaaayacatgatttc

SEQ ID NO: 10355 - DNA, 21 bp, Homo sapiens
gatgctattgkctttccctcg

SEQ ID NO: 10356 - DNA, 21 bp, Homo sapiens
tgtaagaaaartcaccctaac

SEQ ID NO: 10357 - DNA, 21 bp, Homo sapiens
tttatttgctrtaacatgtgg

SEQ ID NO: 10358 - DNA, 21 bp, Homo sapiens
ggctgaatggwtgaaaaaaca

SEQ ID NO: 10359 - DNA, 21 bp, Homo sapiens
aagttgacaaycttaaaccag

SEQ ID NO: 10360 - DNA, 21 bp, Homo sapiens
agcaggacttyccctaaacca

SEQ ID NO: 10361 - DNA, 21 bp, Homo sapiens
gaaacttccaraaccaagcaa

SEQ ID NO: 10362 - DNA, 21 bp, Homo sapiens
acacaaaaacrgtaagtgaaa

SEQ ID NO: 10363 - DNA, 21 bp, Homo sapiens
aattatgtaaygcaaggctaa

SEQ ID NO: 10364 - DNA, 21 bp, Homo sapiens
cacatgcaccscatggctttc

SEQ ID NO: 10365 - DNA, 21 bp, Homo sapiens
ggaatgtggtyataaagtgtt

SEQ ID NO: 10366 - DNA, 21 bp, Homo sapiens
tctggggtctrtgagattggt

SEQ ID NO: 10367 - DNA, 21 bp, Homo sapiens
gcagacttcamcttgtgcacc

SEQ ID NO: 10368 - DNA, 21 bp, Homo sapiens
cttaacccctytctttttttg

SEQ ID NO: 10369 - DNA, 21 bp, Homo sapiens
tttctgtggcyctcattttta

SEQ ID NO: 10370 - DNA, 21 bp, Homo sapiens
gtatacctccragcagaatca

SEQ ID NO: 10371 - DNA, 21 bp, Homo sapiens
atcttcactgrttgggcaggt

SEQ ID NO: 10372 - DNA, 21 bp, Homo sapiens
atcctccatgsacagccatag

SEQ ID NO: 10373 - DNA, 21 bp, Homo sapiens
acattccatawgtcagaactc

SEQ ID NO: 10374 - DNA, 21 bp, Homo sapiens
agtacaaagaytacatgatag

SEQ ID NO: 10375 - DNA, 21 bp, Homo sapiens
tggcaatcccrctgctgggta

SEQ ID NO: 10376 - DNA, 21 bp, Homo sapiens
ggaagggttaygttgagactg

SEQ ID NO: 10377 - DNA, 21 bp, Homo sapiens
aaagtttggcygccttctgca

SEQ ID NO: 10378 - DNA, 21 bp, Homo sapiens
agcagtgagtrtatctgtgtg

SEQ ID NO: 10379 - DNA, 21 bp, Homo sapiens
actcaagtatwtaacggcagg

SEQ ID NO: 10380 - DNA, 21 bp, Homo sapiens
gaaagaagtgmaatattgtta

SEQ ID NO: 10381 - DNA, 21 bp, Homo sapiens
aacaacccacrgcgaaggcaa

SEQ ID NO: 10382 - DNA, 21 bp, Homo sapiens
tttgttgggtrgctgcctatc

SEQ ID NO: 10383 - DNA, 21 bp, Homo sapiens
acactaagaawaaactctagt

SEQ ID NO: 10384 - DNA, 21 bp, Homo sapiens
gtgggtgcagkaaagaaaggc

SEQ ID NO: 10385 - DNA, 21 bp, Homo sapiens
atataggttgrctgttcatat

SEQ ID NO: 10386 - DNA, 21 bp, Homo sapiens
atatctagggytatctctaat

SEQ ID NO: 10387 - DNA, 21 bp, Homo sapiens
gaataactccktcgtatacaa

SEQ ID NO: 10388 - DNA, 21 bp, Homo sapiens
gtgctgaatgrgtctcaggag

SEQ ID NO: 10389 - DNA, 21 bp, Homo sapiens
taggcagaagrttgggactga

SEQ ID NO: 10390 - DNA, 21 bp, Homo sapiens
cctcagtaacrgagggaattt

SEQ ID NO: 10391 - DNA, 21 bp, Homo sapiens
tcttatctctrtgttgttctt

SEQ ID NO: 10392 - DNA, 21 bp, Homo sapiens
ataatacagaragcaaggaac

SEQ ID NO: 10393 - DNA, 21 bp, Homo sapiens
tttgaatgtasaacattgcta

SEQ ID NO: 10394 - DNA, 21 bp, Homo sapiens
agtatttggtrgggagcaggg

SEQ ID NO: 10395 - DNA, 21 bp, Homo sapiens
ttacagcacaygtgatcttaa

SEQ ID NO: 10396 - DNA, 21 bp, Homo sapiens
aaaaagtttcytttacaaatg

SEQ ID NO: 10397 - DNA, 21 bp, Homo sapiens
ctggagcaaakccagcctgaa

SEQ ID NO: 10398 - DNA, 21 bp, Homo sapiens
tattctttgawgttgtagata

SEQ ID NO: 10399 - DNA, 21 bp, Homo sapiens
cttggaaagawctgtgctata

SEQ ID NO: 10400 - DNA, 21 bp, Homo sapiens
gttacttaccrgtttctccag

SEQ ID NO: 10401 - DNA, 21 bp, Homo sapiens
tgccatgtcasttttcctctc

SEQ ID NO: 10402 - DNA, 21 bp, Homo sapiens
actcatatgasgattagtcag

SEQ ID NO: 10403 - DNA, 21 bp, Homo sapiens
ttcatgaaaayagagcatgca

SEQ ID NO: 10404 - DNA, 21 bp, Homo sapiens
gtactgaatamtcgggagaat

SEQ ID NO: 10405 - DNA, 21 bp, Homo sapiens
ctgttaaaaaracaagacctt

SEQ ID NO: 10406 - DNA, 21 bp, Homo sapiens
aatgttgacasttaagggtcc

SEQ ID NO: 10407 - DNA, 21 bp, Homo sapiens
ggggtccccarcctccacacc

SEQ ID NO: 10408 - DNA, 21 bp, Homo sapiens
atgccctaaaygattgtatta

SEQ ID NO: 10409 - DNA, 21 bp, Homo sapiens
tccagcagggkttctttctta

SEQ ID NO: 10410 - DNA, 21 bp, Homo sapiens
gggatgttccsacggccatta

SEQ ID NO: 10411 - DNA, 21 bp, Homo sapiens
gagtgtttggrgctgattgta

SEQ ID NO: 10412 - DNA, 21 bp, Homo sapiens
tttcttccggrttgttcttca

SEQ ID NO: 10413 - DNA, 21 bp, Homo sapiens
cagtgagcagyaacatcaaga

SEQ ID NO: 10414 - DNA, 21 bp, Homo sapiens
aaactgggacmtggttaccct

SEQ ID NO: 10415 - DNA, 21 bp, Homo sapiens
ttcatgatgcrtccccatcaa

SEQ ID NO: 10416 - DNA, 21 bp, Homo sapiens
agaagaggaamaaggtgcaaa

SEQ ID NO: 10417 - DNA, 21 bp, Homo sapiens
aagaaacagawgttatttggc

SEQ ID NO: 10418 - DNA, 21 bp, Homo sapiens
atagtcttgaygtagtgagga

SEQ ID NO: 10419 - DNA, 21 bp, Homo sapiens
attcttaattkcacagttatg

SEQ ID NO: 10420 - DNA, 21 bp, Homo sapiens
ttcaaaaactktgctgaatgg

SEQ ID NO: 10421 - DNA, 21 bp, Homo sapiens
agtggtacctrgttggggctt

SEQ ID NO: 10422 - DNA, 21 bp, Homo sapiens
ctggtcctggkgataaaagct

SEQ ID NO: 10423 - DNA, 21 bp, Homo sapiens
atattttctayagaccttcaa

SEQ ID NO: 10424 - DNA, 21 bp, Homo sapiens
ttttcggtgtktgatgtttag

SEQ ID NO: 10425 - DNA, 21 bp, Homo sapiens
ttagcagtgawttagtcattt

SEQ ID NO: 10426 - DNA, 21 bp, Homo sapiens
tttggtgcttraaacatgaca

SEQ ID NO: 10427 - DNA, 21 bp, Homo sapiens
ctgggtgatgyggttttcata

SEQ ID NO: 10428 - DNA, 21 bp, Homo sapiens
aaattaaaatrtattagcatt

SEQ ID NO: 10429 - DNA, 21 bp, Homo sapiens
caagcagtttmaatattatgc

SEQ ID NO: 10430 - DNA, 21 bp, Homo sapiens
tgaagtgttayagcaggctcc

SEQ ID NO: 10431 - DNA, 21 bp, Homo sapiens
ggctgtgacayttgttggtgg

SEQ ID NO: 10432 - DNA, 21 bp, Homo sapiens
ctacccccagyactcctacca

SEQ ID NO: 10433 - DNA, 21 bp, Homo sapiens
atttataataytattgctctt

SEQ ID NO: 10434 - DNA, 21 bp, Homo sapiens
gcagtacaccktgcagcaact

SEQ ID NO: 10435 - DNA, 21 bp, Homo sapiens
gtctctgcttygtaatttaga

SEQ ID NO: 10436 - DNA, 21 bp, Homo sapiens
gatgcgaccayaggagtagcc

SEQ ID NO: 10437 - DNA, 21 bp, Homo sapiens
aaaatccagaraagcaatgag

SEQ ID NO: 10438 - DNA, 21 bp, Homo sapiens
acagatttaaygcagaatgtt

SEQ ID NO: 10439 - DNA, 21 bp, Homo sapiens
gcacttcattrtcattaccca

SEQ ID NO: 10440 - DNA, 21 bp, Homo sapiens
tctagcttagyttcatttatt

SEQ ID NO: 10441 - DNA, 21 bp, Homo sapiens
gttgggaggakcactgagtga

SEQ ID NO: 10442 - DNA, 21 bp, Homo sapiens
cattcacatgygtgataatag

SEQ ID NO: 10443 - DNA, 21 bp, Homo sapiens
aaaatcataaytgaccctttt

SEQ ID NO: 10444 - DNA, 21 bp, Homo sapiens
ctgcattttamcgagtttccc

SEQ ID NO: 10445 - DNA, 21 bp, Homo sapiens
acttgacttayccaaatttgc

SEQ ID NO: 10446 - DNA, 21 bp, Homo sapiens
gctctgtccasgagagttttt

SEQ ID NO: 10447 - DNA, 21 bp, Homo sapiens
caaagtatcawgaattttgat

SEQ ID NO: 10448 - DNA, 21 bp, Homo sapiens
atgaatcaaartgatacctag

SEQ ID NO: 10449 - DNA, 21 bp, Homo sapiens
acagtaaatargatatctttt

SEQ ID NO: 10450 - DNA, 21 bp, Homo sapiens
gaccttcactktatacttttc

SEQ ID NO: 10451 - DNA, 21 bp, Homo sapiens
agaatgtggcygattaaatgc

SEQ ID NO: 10452 - DNA, 21 bp, Homo sapiens
agatgagagawgtgatggagg

SEQ ID NO: 10453 - DNA, 21 bp, Homo sapiens
tgactctgctsttcctataat

SEQ ID NO: 10454 - DNA, 21 bp, Homo sapiens
cacaaaaaacmaacaaaaata

SEQ ID NO: 10455 - DNA, 21 bp, Homo sapiens
agaccatccargcagactcag

SEQ ID NO: 10456 - DNA, 21 bp, Homo sapiens
tatatcattgytatgcctagc

SEQ ID NO: 10457 - DNA, 21 bp, Homo sapiens
gcatttctaamaatttctttt

SEQ ID NO: 10458 - DNA, 21 bp, Homo sapiens
agtggaaaatrcaatacccgg

SEQ ID NO: 10459 - DNA, 21 bp, Homo sapiens
atttagtcttmagtgagacca

SEQ ID NO: 10460 - DNA, 21 bp, Homo sapiens
tcatggtaggyggggattgac

SEQ ID NO: 10461 - DNA, 21 bp, Homo sapiens
ggcttcacagmaggatggcac

SEQ ID NO: 10462 - DNA, 21 bp, Homo sapiens
gctcctgagtratatgctggt

SEQ ID NO: 10463 - DNA, 21 bp, Homo sapiens
tgaagaaagastgcatcccct

SEQ ID NO: 10464 - DNA, 21 bp, Homo sapiens
ttgctttagaytgaggtatat

SEQ ID NO: 10465 - DNA, 21 bp, Homo sapiens
ttctaatctamttacctggtg

SEQ ID NO: 10466 - DNA, 21 bp, Homo sapiens
tattatagcarggagcaacca

SEQ ID NO: 10467 - DNA, 21 bp, Homo sapiens
ggtttggctaygtgtccacca

SEQ ID NO: 10468 - DNA, 21 bp, Homo sapiens
atctaacatcscaatttgttc

SEQ ID NO: 10469 - DNA, 21 bp, Homo sapiens
gccttctggcytccatgattt

SEQ ID NO: 10470 - DNA, 21 bp, Homo sapiens
ttagtaccaawttttttttcc

SEQ ID NO: 10471 - DNA, 21 bp, Homo sapiens
gtataaacatrtgaattatgg

SEQ ID NO: 10472 - DNA, 21 bp, Homo sapiens
gaacctcaagyttaaaaatct

SEQ ID NO: 10473 - DNA, 21 bp, Homo sapiens
aaatttttccktactagcaaa

SEQ ID NO: 10474 - DNA, 21 bp, Homo sapiens
attttcgaaaracatttttct

SEQ ID NO: 10475 - DNA, 21 bp, Homo sapiens
tcatatgatastagaaacaat

SEQ ID NO: 10476 - DNA, 21 bp, Homo sapiens
aatgtcatgcrttttccaaat

SEQ ID NO: 10477 - DNA, 21 bp, Homo sapiens
ttccttgcagwgagaaaagac

SEQ ID NO: 10478 - DNA, 21 bp, Homo sapiens
tcacaggagarcatacattgt

SEQ ID NO: 10479 - DNA, 21 bp, Homo sapiens
attttctgaaygtaaaagtca

SEQ ID NO: 10480 - DNA, 21 bp, Homo sapiens
tattagaacawgtaggaaatc

SEQ ID NO: 10481 - DNA, 21 bp, Homo sapiens
ttgacaagaayttaataacat

SEQ ID NO: 10482 - DNA, 21 bp, Homo sapiens
gtaatgtagcmtctgttcaaa

SEQ ID NO: 10483 - DNA, 21 bp, Homo sapiens
gttgatagcartttgtttgtg

SEQ ID NO: 10484 - DNA, 21 bp, Homo sapiens
tgggggtgatkctgagaattt

SEQ ID NO: 10485 - DNA, 21 bp, Homo sapiens
aaggcgttggkctttgaatga

SEQ ID NO: 10486 - DNA, 21 bp, Homo sapiens
gtgttggagamtaatgaggaa

SEQ ID NO: 10487 - DNA, 21 bp, Homo sapiens
tttttccaagwttatggaatt

SEQ ID NO: 10488 - DNA, 21 bp, Homo sapiens
tgctgtgaaayatatgcaaca

SEQ ID NO: 10489 - DNA, 21 bp, Homo sapiens
attatggttcyaaaaccaaaa

SEQ ID NO: 10490 - DNA, 21 bp, Homo sapiens
tgtcctcctawtttttgtatt

SEQ ID NO: 10491 - DNA, 21 bp, Homo sapiens
caagaaacatrttatttttct

SEQ ID NO: 10492 - DNA, 21 bp, Homo sapiens
gaatttgaaarcttcaaggcc

SEQ ID NO: 10493 - DNA, 21 bp, Homo sapiens
ggtggtggtgraggaatggaa

SEQ ID NO: 10494 - DNA, 21 bp, Homo sapiens
acattcaaagkttcaaacaaa

SEQ ID NO: 10495 - DNA, 21 bp, Homo sapiens
gaggcaggtargtgcctgccc

SEQ ID NO: 10496 - DNA, 21 bp, Homo sapiens
agatatagtcyaccctggaga

SEQ ID NO: 10497 - DNA, 21 bp, Homo sapiens
actccctcttygacagcaatg

SEQ ID NO: 10498 - DNA, 21 bp, Homo sapiens
ttctctgcgamcaaggagaaa

SEQ ID NO: 10499 - DNA, 21 bp, Homo sapiens
cctccatcatytgctttttgg

SEQ ID NO: 10500 - DNA, 21 bp, Homo sapiens
tagacatgctstaatgaaaat

SEQ ID NO: 10501 - DNA, 21 bp, Homo sapiens
gaacatgcccygatcaagaaa

SEQ ID NO: 10502 - DNA, 21 bp, Homo sapiens
ctgagtgcatwctgaagacac

SEQ ID NO: 10503 - DNA, 21 bp, Homo sapiens
cagtcattagwaagatagtat

SEQ ID NO: 10504 - DNA, 21 bp, Homo sapiens
ccattctcccyggctttttcc

SEQ ID NO: 10505 - DNA, 21 bp, Homo sapiens
tttaatatgcygtctactaga

SEQ ID NO: 10506 - DNA, 21 bp, Homo sapiens
gaatgttagcrctggccatat

SEQ ID NO: 10507 - DNA, 21 bp, Homo sapiens
aaatatttttmaacatagtta

SEQ ID NO: 10508 - DNA, 21 bp, Homo sapiens
aaatctttatrtattatgctt

SEQ ID NO: 10509 - DNA, 21 bp, Homo sapiens
ctgtttgtctrttccctaact

SEQ ID NO: 10510 - DNA, 21 bp, Homo sapiens
gagaattgcakgcatgcacac

SEQ ID NO: 10511 - DNA, 21 bp, Homo sapiens
aaaagcatctrgacactagag

SEQ ID NO: 10512 - DNA, 21 bp, Homo sapiens
atcatagaaakctagaaatag

SEQ ID NO: 10513 - DNA, 21 bp, Homo sapiens
acttgtataayagcaaaaatg

SEQ ID NO: 10514 - DNA, 21 bp, Homo sapiens
ctcagtccccyatgagggtgc

SEQ ID NO: 10515 - DNA, 21 bp, Homo sapiens
caataaaagartctttttctc

SEQ ID NO: 10516 - DNA, 21 bp, Homo sapiens
gctctcatatrtacagacatt

SEQ ID NO: 10517 - DNA, 21 bp, Homo sapiens
aatactgtacyatttgcctta

SEQ ID NO: 10518 - DNA, 21 bp, Homo sapiens
ccttctctatsaaagactttc

SEQ ID NO: 10519 - DNA, 21 bp, Homo sapiens
aatataaaatrttctcctggt

SEQ ID NO: 10520 - DNA, 21 bp, Homo sapiens
aggaatgtatrccaaagttac

SEQ ID NO: 10521 - DNA, 21 bp, Homo sapiens
aaaaagcaacrataaaggcta

SEQ ID NO: 10522 - DNA, 21 bp, Homo sapiens
gtcttgagtgytccattccct

SEQ ID NO: 10523 - DNA, 21 bp, Homo sapiens
atcaatcagawgagagcaaac

SEQ ID NO: 10524 - DNA, 21 bp, Homo sapiens
tgttgtgcagraccatatata

SEQ ID NO: 10525 - DNA, 21 bp, Homo sapiens
attgcttgaargacatacttc

SEQ ID NO: 10526 - DNA, 21 bp, Homo sapiens
ttttgaagtcraatttgtaat

SEQ ID NO: 10527 - DNA, 21 bp, Homo sapiens
gtacttagagrgttttaaaat

SEQ ID NO: 10528 - DNA, 21 bp, Homo sapiens
aaccctttctstaagtcttgg

SEQ ID NO: 10529 - DNA, 21 bp, Homo sapiens
gaacaattttygatataatat

SEQ ID NO: 10530 - DNA, 21 bp, Homo sapiens
gagtcttcctraccacaatag

SEQ ID NO: 10531 - DNA, 21 bp, Homo sapiens
tgtattcttcwaatacaagat

SEQ ID NO: 10532 - DNA, 21 bp, Homo sapiens
gatatgagtcrtagggaaggt

SEQ ID NO: 10533 - DNA, 21 bp, Homo sapiens
gattaggtcayttgtatatgc

SEQ ID NO: 10534 - DNA, 21 bp, Homo sapiens
caaatcagatycatgtagtaa

SEQ ID NO: 10535 - DNA, 21 bp, Homo sapiens
ttattttatcrttttggttgc

SEQ ID NO: 10536 - DNA, 21 bp, Homo sapiens
caaagagaaaratctaaaagc

SEQ ID NO: 10537 - DNA, 21 bp, Homo sapiens
gaaggagtgaycacagaagtg

SEQ ID NO: 10538 - DNA, 21 bp, Homo sapiens
attcgcttacsttgaatggcg

SEQ ID NO: 10539 - DNA, 21 bp, Homo sapiens
catgcctgtartaacagtaca

SEQ ID NO: 10540 - DNA, 21 bp, Homo sapiens
gcccattaatkcctctacaga

SEQ ID NO: 10541 - DNA, 21 bp, Homo sapiens
taagagaaccyccaagaggtt

SEQ ID NO: 10542 - DNA, 21 bp, Homo sapiens
acagcaatcamtgcccccatc

SEQ ID NO: 10543 - DNA, 21 bp, Homo sapiens
aaaagacaacyccttttcatg

SEQ ID NO: 10544 - DNA, 21 bp, Homo sapiens
accccataaargatgtaaccc

SEQ ID NO: 10545 - DNA, 21 bp, Homo sapiens
cactgggaaaracataaggga

SEQ ID NO: 10546 - DNA, 21 bp, Homo sapiens
agaattatcawtaaggatgaa

SEQ ID NO: 10547 - DNA, 21 bp, Homo sapiens
tatttgttctktaggacagct

SEQ ID NO: 10548 - DNA, 21 bp, Homo sapiens
tcctacagctkcagattacac

SEQ ID NO: 10549 - DNA, 21 bp, Homo sapiens
tatatagagaraaccctgaag

SEQ ID NO: 10550 - DNA, 21 bp, Homo sapiens
cgttcttgttwctccagttcc

SEQ ID NO: 10551 - DNA, 21 bp, Homo sapiens
ctgtagctgtyacaaattctt

SEQ ID NO: 10552 - DNA, 21 bp, Homo sapiens
atgtataaacrtttcaagatt

SEQ ID NO: 10553 - DNA, 21 bp, Homo sapiens
tgtttgaaacratgttcattg

SEQ ID NO: 10554 - DNA, 21 bp, Homo sapiens
attttatattygattatcaat

SEQ ID NO: 10555 - DNA, 21 bp, Homo sapiens
tctatccttayggaaaagatg

SEQ ID NO: 10556 - DNA, 21 bp, Homo sapiens
actggaggttyataagtgcaa

SEQ ID NO: 10557 - DNA, 21 bp, Homo sapiens
ttggtgtattmcagaggcaag

SEQ ID NO: 10558 - DNA, 21 bp, Homo sapiens
tgcaggtttarcagtctcatt

SEQ ID NO: 10559 - DNA, 21 bp, Homo sapiens
cattgattctktagatcactt

SEQ ID NO: 10560 - DNA, 21 bp, Homo sapiens
ttgaagataaygtgtgaggag

SEQ ID NO: 10561 - DNA, 21 bp, Homo sapiens
aattttactckgtgtcaataa

SEQ ID NO: 10562 - DNA, 21 bp, Homo sapiens
tctttatatcraggactaagt

SEQ ID NO: 10563 - DNA, 21 bp, Homo sapiens
ttaataattcrgtcatcgagt

SEQ ID NO: 10564 - DNA, 21 bp, Homo sapiens
tagtaagttgrtggactttga

SEQ ID NO: 10565 - DNA, 21 bp, Homo sapiens
caaaactttgyaccctttgac

SEQ ID NO: 10566 - DNA, 21 bp, Homo sapiens
catttttaaasatcttgcacc

SEQ ID NO: 10567 - DNA, 21 bp, Homo sapiens
ggttgcagtcrtaactttagg

SEQ ID NO: 10568 - DNA, 21 bp, Homo sapiens
cttttgccttmatagtgtcct

SEQ ID NO: 10569 - DNA, 21 bp, Homo sapiens
tctaaggagargtcacctttg

SEQ ID NO: 10570 - DNA, 21 bp, Homo sapiens
tgtaagaaacrgcctgaacag

SEQ ID NO: 10571 - DNA, 21 bp, Homo sapiens
gatgtacttaygcatgaagat

SEQ ID NO: 10572 - DNA, 21 bp, Homo sapiens
attttttcccyaatctttatg

SEQ ID NO: 10573 - DNA, 21 bp, Homo sapiens
atcagtcttgwtaagttcact

SEQ ID NO: 10574 - DNA, 21 bp, Homo sapiens
ttatcgacatwaagttgttca

SEQ ID NO: 10575 - DNA, 21 bp, Homo sapiens
tcatccagtgyattttttcat

SEQ ID NO: 10576 - DNA, 21 bp, Homo sapiens
acagaatttcrggtctgtttt

SEQ ID NO: 10577 - DNA, 21 bp, Homo sapiens
cagaatgtttycattgttaat

SEQ ID NO: 10578 - DNA, 21 bp, Homo sapiens
aaccttaagtscacattaaaa

SEQ ID NO: 10579 - DNA, 21 bp, Homo sapiens
gaccttcaccytcacccatat

SEQ ID NO: 10580 - DNA, 21 bp, Homo sapiens
atgacctagtygctgatagat

SEQ ID NO: 10581 - DNA, 21 bp, Homo sapiens
ttaagcacttmcggggatttg

SEQ ID NO: 10582 - DNA, 21 bp, Homo sapiens
taagagtccakcttttatgac

SEQ ID NO: 10583 - DNA, 21 bp, Homo sapiens
attcactctcstacactatcc

SEQ ID NO: 10584 - DNA, 21 bp, Homo sapiens
ctctatggaargtatttaaaa

SEQ ID NO: 10585 - DNA, 21 bp, Homo sapiens
gacttgagtcrcttacaacac

SEQ ID NO: 10586 - DNA, 21 bp, Homo sapiens
ttcgagagatrgtattgaaag

SEQ ID NO: 10587 - DNA, 21 bp, Homo sapiens
gggattagatyaaaaatttat

SEQ ID NO: 10588 - DNA, 21 bp, Homo sapiens
ttactaccaasactatattac

SEQ ID NO: 10589 - DNA, 21 bp, Homo sapiens
caaaacacttrgtaggccctg

SEQ ID NO: 10590 - DNA, 21 bp, Homo sapiens
aagctgtgagygtggaagagc

SEQ ID NO: 10591 - DNA, 21 bp, Homo sapiens
ttattaaactmcagctattgt

SEQ ID NO: 10592 - DNA, 21 bp, Homo sapiens
accgatacctrtatttctata

SEQ ID NO: 10593 - DNA, 21 bp, Homo sapiens
ttaattttctwgtttttatga

SEQ ID NO: 10594 - DNA, 21 bp, Homo sapiens
aagtaatgacrtgctcaaaaa

SEQ ID NO: 10595 - DNA, 21 bp, Homo sapiens
tttatactgaycagtgattgt

SEQ ID NO: 10596 - DNA, 21 bp, Homo sapiens
attctatggaytattgcttgc

SEQ ID NO: 10597 - DNA, 21 bp, Homo sapiens
gacacatgctraaaaggaata

SEQ ID NO: 10598 - DNA, 21 bp, Homo sapiens
tgcagtgaacrtatttttact

SEQ ID NO: 10599 - DNA, 21 bp, Homo sapiens
acccatcttaytctgtttgtt

SEQ ID NO: 10600 - DNA, 21 bp, Homo sapiens
tagctatttcytttttttcct

SEQ ID NO: 10601 - DNA, 21 bp, Homo sapiens
gattgtgccakgtaggaactt

SEQ ID NO: 10602 - DNA, 21 bp, Homo sapiens
aattgaggaaygtttccctct

SEQ ID NO: 10603 - DNA, 21 bp, Homo sapiens
atctgttcacrtcactgtcct

SEQ ID NO: 10604 - DNA, 21 bp, Homo sapiens
ccattaccacwcacagagttt

SEQ ID NO: 10605 - DNA, 21 bp, Homo sapiens
gttcattcttycctgtcacat

SEQ ID NO: 10606 - DNA, 21 bp, Homo sapiens
ggaaaatgtgrggttggaggt

SEQ ID NO: 10607 - DNA, 21 bp, Homo sapiens
tagccaaatcmtcttaaaagc

SEQ ID NO: 10608 - DNA, 21 bp, Homo sapiens
agatatttaayaaaaataaac

SEQ ID NO: 10609 - DNA, 21 bp, Homo sapiens
ataattcaaartgtccaagca

SEQ ID NO: 10610 - DNA, 21 bp, Homo sapiens
atccaaaaatrtttactcctc

SEQ ID NO: 10611 - DNA, 21 bp, Homo sapiens
cagaaaatggmaaccattacc

SEQ ID NO: 10612 - DNA, 21 bp, Homo sapiens
cagcaacatgytaaaagttta

SEQ ID NO: 10613 - DNA, 21 bp, Homo sapiens
ttcttgtctakttgatctttt

SEQ ID NO: 10614 - DNA, 21 bp, Homo sapiens
ttacacaccaygataaggcaa

SEQ ID NO: 10615 - DNA, 21 bp, Homo sapiens
gcaactatttwaaattttctc

SEQ ID NO: 10616 - DNA, 21 bp, Homo sapiens
aaccaaaataygagttttaaa

SEQ ID NO: 10617 - DNA, 21 bp, Homo sapiens
cagaccctagygcttttgatg

SEQ ID NO: 10618 - DNA, 21 bp, Homo sapiens
tgttattaacwttttttttca

SEQ ID NO: 10619 - DNA, 21 bp, Homo sapiens
ttatgtcctcytaaaccataa

SEQ ID NO: 10620 - DNA, 21 bp, Homo sapiens
tttctgagggycaaatatcag

SEQ ID NO: 10621 - DNA, 21 bp, Homo sapiens
agtctgttcaygggagctggc

SEQ ID NO: 10622 - DNA, 21 bp, Homo sapiens
atggtatattygtttccatcc

SEQ ID NO: 10623 - DNA, 21 bp, Homo sapiens
ttagaacacaraaaacatcca

SEQ ID NO: 10624 - DNA, 21 bp, Homo sapiens
acatgctaggkttccctctct

SEQ ID NO: 10625 - DNA, 21 bp, Homo sapiens
tttcctcaacrctgccttggg

SEQ ID NO: 10626 - DNA, 21 bp, Homo sapiens
aacaaacatgyttccccatat

SEQ ID NO: 10627 - DNA, 21 bp, Homo sapiens
gtcagtcagaytagaggtcag

SEQ ID NO: 10628 - DNA, 21 bp, Homo sapiens
gaaagcaggcrtattaaagtg

SEQ ID NO: 10629 - DNA, 21 bp, Homo sapiens
cacaaaaagamagaaattgtt

SEQ ID NO: 10630 - DNA, 21 bp, Homo sapiens
tcaagtaattwttgtatccaa

SEQ ID NO: 10631 - DNA, 21 bp, Homo sapiens
ttcacatccakaggttaatta

SEQ ID NO: 10632 - DNA, 21 bp, Homo sapiens
atagtaagagytgacaattat

SEQ ID NO: 10633 - DNA, 21 bp, Homo sapiens
aggacacctcyttaacaactc

SEQ ID NO: 10634 - DNA, 21 bp, Homo sapiens
tgagcaaaatkttcagagaga

SEQ ID NO: 10635 - DNA, 21 bp, Homo sapiens
cattcattacrtagaatatcc

SEQ ID NO: 10636 - DNA, 21 bp, Homo sapiens
aaatttaagcmttccttatga

SEQ ID NO: 10637 - DNA, 21 bp, Homo sapiens
taaactattawaatatgtaat

SEQ ID NO: 10638 - DNA, 21 bp, Homo sapiens
caaataaaagraagcccaatt

SEQ ID NO: 10639 - DNA, 21 bp, Homo sapiens
tgttagtgtgkatcctcttaa

SEQ ID NO: 10640 - DNA, 21 bp, Homo sapiens
ctctaacttawtttttcaaga

SEQ ID NO: 10641 - DNA, 21 bp, Homo sapiens
atataaatgaygttagaatag

SEQ ID NO: 10642 - DNA, 21 bp, Homo sapiens
agagtgggaamgcaactctta

SEQ ID NO: 10643 - DNA, 21 bp, Homo sapiens
gcctcatataraacttaccac

SEQ ID NO: 10644 - DNA, 21 bp, Homo sapiens
ctagagagtgrcagtatccat

SEQ ID NO: 10645 - DNA, 21 bp, Homo sapiens
gaaagatgccyagcggaagaa

SEQ ID NO: 10646 - DNA, 21 bp, Homo sapiens
tacaaatacasaaaagtgcaa

SEQ ID NO: 10647 - DNA, 21 bp, Homo sapiens
ttggttgacarcgtgttcccc

SEQ ID NO: 10648 - DNA, 21 bp, Homo sapiens
cagaggcatartgttcttcct

SEQ ID NO: 10649 - DNA, 21 bp, Homo sapiens
tcttctcttawttcctaattt

SEQ ID NO: 10650 - DNA, 21 bp, Homo sapiens
attaaacttcrttagaaacca

SEQ ID NO: 10651 - DNA, 21 bp, Homo sapiens
taaaatattaycttctgaatc

SEQ ID NO: 10652 - DNA, 21 bp, Homo sapiens
tctaggcagakaaacaaatta

SEQ ID NO: 10653 - DNA, 21 bp, Homo sapiens
gaatggtgagkcagcacctta

SEQ ID NO: 10654 - DNA, 21 bp, Homo sapiens
tattttttatrtatgctaaat

SEQ ID NO: 10655 - DNA, 21 bp, Homo sapiens
attagagagayggaaagtggt

SEQ ID NO: 10656 - DNA, 21 bp, Homo sapiens
accctggaacrttttcccctc

SEQ ID NO: 10657 - DNA, 21 bp, Homo sapiens
gatacatgatrcacatacaat

SEQ ID NO: 10658 - DNA, 21 bp, Homo sapiens
catatcttggrtttatactga

SEQ ID NO: 10659 - DNA, 21 bp, Homo sapiens
tgagcatgtcyagaactattt

SEQ ID NO: 10660 - DNA, 21 bp, Homo sapiens
atgtgaatggmaagtaattta

SEQ ID NO: 10661 - DNA, 21 bp, Homo sapiens
tggattcatcytgaaaaactg

SEQ ID NO: 10662 - DNA, 21 bp, Homo sapiens
actgaaagtcwgcttctgttg

SEQ ID NO: 10663 - DNA, 21 bp, Homo sapiens
gatgtctgttyggatctattg

SEQ ID NO: 10664 - DNA, 21 bp, Homo sapiens
tggattgaatyagttgaagtt

SEQ ID NO: 10665 - DNA, 21 bp, Homo sapiens
actaggtaggygggttgaggc

SEQ ID NO: 10666 - DNA, 21 bp, Homo sapiens
ctattcatgayatttcagaag

SEQ ID NO: 10667 - DNA, 21 bp, Homo sapiens
tcctttttgtrgttgcttcat

SEQ ID NO: 10668 - DNA, 21 bp, Homo sapiens
tgtgcatcctrgctttgtgac

SEQ ID NO: 10669 - DNA, 21 bp, Homo sapiens
aaagctaataygtgagtgatt

SEQ ID NO: 10670 - DNA, 21 bp, Homo sapiens
tgtccttttaytgcctgtgtt

SEQ ID NO: 10671 - DNA, 21 bp, Homo sapiens
agtaatagatrtggaaacata

SEQ ID NO: 10672 - DNA, 21 bp, Homo sapiens
gtagcagctaygaatctttga

SEQ ID NO: 10673 - DNA, 21 bp, Homo sapiens
ttttaggaagmatcaaactaa

SEQ ID NO: 10674 - DNA, 21 bp, Homo sapiens
tttctcatgcragttttagca

SEQ ID NO: 10675 - DNA, 21 bp, Homo sapiens
gtgaagaggtraaaagaataa

SEQ ID NO: 10676 - DNA, 21 bp, Homo sapiens
gagtgataccrcaggtgagca

SEQ ID NO: 10677 - DNA, 21 bp, Homo sapiens
gattatggatragtactaaga

SEQ ID NO: 10678 - DNA, 21 bp, Homo sapiens
agtattatgaraccatatgtt

SEQ ID NO: 10679 - DNA, 21 bp, Homo sapiens
taagttgaggytctctcttgt

SEQ ID NO: 10680 - DNA, 21 bp, Homo sapiens
atggggaggakagctggagaa

SEQ ID NO: 10681 - DNA, 21 bp, Homo sapiens
tttaatgctasgttgtaatga

SEQ ID NO: 10682 - DNA, 21 bp, Homo sapiens
ataggtggtcmtcaataccct

SEQ ID NO: 10683 - DNA, 21 bp, Homo sapiens
ctaagccccarattgctgctc

SEQ ID NO: 10684 - DNA, 21 bp, Homo sapiens
tgtgctctgcrtattcattcc

SEQ ID NO: 10685 - DNA, 21 bp, Homo sapiens
cattccaagtragcctgagac

SEQ ID NO: 10686 - DNA, 21 bp, Homo sapiens
attgtatatastgtaggagaa

SEQ ID NO: 10687 - DNA, 21 bp, Homo sapiens
gggtgtatacyggtgtatatg

SEQ ID NO: 10688 - DNA, 21 bp, Homo sapiens
acttctataaygggagctgtg

SEQ ID NO: 10689 - DNA, 21 bp, Homo sapiens
atttatggtgkatgtataagt

SEQ ID NO: 10690 - DNA, 21 bp, Homo sapiens
agagatgcatrgcgtgaggat

SEQ ID NO: 10691 - DNA, 21 bp, Homo sapiens
tgtctcttcaytggggctttt

SEQ ID NO: 10692 - DNA, 21 bp, Homo sapiens
ctgaattatgyattgttttat

SEQ ID NO: 10693 - DNA, 21 bp, Homo sapiens
ataaatattargtttaaaggc

SEQ ID NO: 10694 - DNA, 21 bp, Homo sapiens
tattacactasttccaatttc

SEQ ID NO: 10695 - DNA, 21 bp, Homo sapiens
ccatttaaaayggtacaagtt

SEQ ID NO: 10696 - DNA, 21 bp, Homo sapiens
ctgttaagtcygcaaaatggg

SEQ ID NO: 10697 - DNA, 21 bp, Homo sapiens
attctataagyactctttcta

SEQ ID NO: 10698 - DNA, 21 bp, Homo sapiens
tactacatagygcacagcctt

SEQ ID NO: 10699 - DNA, 21 bp, Homo sapiens
actgctataaratgtatattt

SEQ ID NO: 10700 - DNA, 21 bp, Homo sapiens
ggagcctgagrcaggaagaaa

SEQ ID NO: 10701 - DNA, 21 bp, Homo sapiens
aaatgctaacrtcaccaaaat

SEQ ID NO: 10702 - DNA, 21 bp, Homo sapiens
gtgccaaaaaktccctcaata

SEQ ID NO: 10703 - DNA, 21 bp, Homo sapiens
agtagaagacycagaatgtct

SEQ ID NO: 10704 - DNA, 21 bp, Homo sapiens
ttgtgcctagwcatcaatgac

SEQ ID NO: 10705 - DNA, 21 bp, Homo sapiens
tttccatagcragggtctgca

SEQ ID NO: 10706 - DNA, 21 bp, Homo sapiens
atttatagtgwgacatttctg

SEQ ID NO: 10707 - DNA, 21 bp, Homo sapiens
tataattgttyatggaagaga

SEQ ID NO: 10708 - DNA, 21 bp, Homo sapiens
ataagtatttkttttcatctc

SEQ ID NO: 10709 - DNA, 21 bp, Homo sapiens
aagcacgctgmacgaactgtc

SEQ ID NO: 10710 - DNA, 21 bp, Homo sapiens
gagaaattctrtataagacac

SEQ ID NO: 10711 - DNA, 21 bp, Homo sapiens
tcagtccccakgagagtagca

SEQ ID NO: 10712 - DNA, 21 bp, Homo sapiens
aatttgtttcrgttgcaggaa

SEQ ID NO: 10713 - DNA, 21 bp, Homo sapiens
ctccaattatycaatttaagt

SEQ ID NO: 10714 - DNA, 21 bp, Homo sapiens
ttggagagaayggatttctgt

SEQ ID NO: 10715 - DNA, 21 bp, Homo sapiens
cctgtttgcaragttatccat

SEQ ID NO: 10716 - DNA, 21 bp, Homo sapiens
catcgatataycatttatagt

SEQ ID NO: 10717 - DNA, 21 bp, Homo sapiens
attatcttagyattttaaaag

SEQ ID NO: 10718 - DNA, 21 bp, Homo sapiens
tttttttgttygggaatatta

SEQ ID NO: 10719 - DNA, 21 bp, Homo sapiens
tttagagccayatttgcttag

SEQ ID NO: 10720 - DNA, 21 bp, Homo sapiens
cagtaagccaygtgcgcatgg

SEQ ID NO: 10721 - DNA, 21 bp, Homo sapiens
taattataacsccttgaaaaa

SEQ ID NO: 10722 - DNA, 21 bp, Homo sapiens
ttttctgtggyctctcttctt

SEQ ID NO: 10723 - DNA, 21 bp, Homo sapiens
tcttcagggcyagaatttata

SEQ ID NO: 10724 - DNA, 21 bp, Homo sapiens
caggaatgtcrtaccggactg

SEQ ID NO: 10725 - DNA, 21 bp, Homo sapiens
atgacaaatcwcccactaata

SEQ ID NO: 10726 - DNA, 21 bp, Homo sapiens
taataaaaaawaaccaaaaac

SEQ ID NO: 10727 - DNA, 21 bp, Homo sapiens
ttttgttgatmttttcaatga

SEQ ID NO: 10728 - DNA, 21 bp, Homo sapiens
aggagtaactygccaactgca

SEQ ID NO: 10729 - DNA, 21 bp, Homo sapiens
ttcaacacgcrttcgtcttga

SEQ ID NO: 10730 - DNA, 21 bp, Homo sapiens
tacactagccyagctaagccc

SEQ ID NO: 10731 - DNA, 21 bp, Homo sapiens
atatttaacamggaaaatttg

SEQ ID NO: 10732 - DNA, 21 bp, Homo sapiens
tgtgaaatacygtatagtcaa

SEQ ID NO: 10733 - DNA, 21 bp, Homo sapiens
tgggacctatrtatatggttt

SEQ ID NO: 10734 - DNA, 21 bp, Homo sapiens
ctcttataatyaaaacataga

SEQ ID NO: 10735 - DNA, 21 bp, Homo sapiens
attttgacttktaaaatttta

SEQ ID NO: 10736 - DNA, 21 bp, Homo sapiens
cgattgaggarattttgattc

SEQ ID NO: 10737 - DNA, 21 bp, Homo sapiens
gttaacattcmacagattttc

SEQ ID NO: 10738 - DNA, 21 bp, Homo sapiens
ctctggcattygttttagaga

SEQ ID NO: 10739 - DNA, 21 bp, Homo sapiens
ttaaatctccyccatccccta

SEQ ID NO: 10740 - DNA, 21 bp, Homo sapiens
tactttagggyagcaaagatc

SEQ ID NO: 10741 - DNA, 21 bp, Homo sapiens
tgctccacttkccaaattaga

SEQ ID NO: 10742 - DNA, 21 bp, Homo sapiens
accaaacaatkaagtagtgtt

SEQ ID NO: 10743 - DNA, 21 bp, Homo sapiens
taaaggatcamattgcattca

SEQ ID NO: 10744 - DNA, 21 bp, Homo sapiens
catttgacagragtatataca

SEQ ID NO: 10745 - DNA, 21 bp, Homo sapiens
gtaaaaattayggtggttaac

SEQ ID NO: 10746 - DNA, 21 bp, Homo sapiens
tatctaaactrgagaacaaaa

SEQ ID NO: 10747 - DNA, 21 bp, Homo sapiens
gagtttttttyctaattgcat

SEQ ID NO: 10748 - DNA, 21 bp, Homo sapiens
aagggaatacrgagatgaata

SEQ ID NO: 10749 - DNA, 21 bp, Homo sapiens
tggaaagtggraagatgtcca

SEQ ID NO: 10750 - DNA, 21 bp, Homo sapiens
ggtaatatagrtaagtgttaa

SEQ ID NO: 10751 - DNA, 21 bp, Homo sapiens
gtagaacggtrgagaagccta

SEQ ID NO: 10752 - DNA, 21 bp, Homo sapiens
ggaattattamactttttaaa

SEQ ID NO: 10753 - DNA, 21 bp, Homo sapiens
accaccatcayaatcaagaca

SEQ ID NO: 10754 - DNA, 21 bp, Homo sapiens
gtcctttcatrttttccataa

SEQ ID NO: 10755 - DNA, 21 bp, Homo sapiens
cttccttaaamtcccagtggt

SEQ ID NO: 10756 - DNA, 21 bp, Homo sapiens
ctgtgaagatwgactgatgta

SEQ ID NO: 10757 - DNA, 21 bp, Homo sapiens
aacagtgaatytcctaatttt

SEQ ID NO: 10758 - DNA, 21 bp, Homo sapiens
gtaatacaggyaaatcgaata

SEQ ID NO: 10759 - DNA, 21 bp, Homo sapiens
aaggcaaatgmcccttgcagc

SEQ ID NO: 10760 - DNA, 21 bp, Homo sapiens
ttttagacacrtgaaagctga

SEQ ID NO: 10761 - DNA, 21 bp, Homo sapiens
attttggcacrcattcattta

SEQ ID NO: 10762 - DNA, 21 bp, Homo sapiens
acccatttgargagtttgtgc

SEQ ID NO: 10763 - DNA, 21 bp, Homo sapiens
gaaaatcatgyatcccagtca

SEQ ID NO: 10764 - DNA, 21 bp, Homo sapiens
gtactaatcawagcttaggtt

SEQ ID NO: 10765 - DNA, 21 bp, Homo sapiens
ataccactttrtcttttgtat

SEQ ID NO: 10766 - DNA, 21 bp, Homo sapiens
taattgatgartaaccaattg

SEQ ID NO: 10767 - DNA, 21 bp, Homo sapiens
gccatttcttyttaaaatgac

SEQ ID NO: 10768 - DNA, 21 bp, Homo sapiens
ctggatctccratgggacata

SEQ ID NO: 10769 - DNA, 21 bp, Homo sapiens
cattgattgtyggccaaagtt

SEQ ID NO: 10770 - DNA, 21 bp, Homo sapiens
atgtaaatctwactaaaggat

SEQ ID NO: 10771 - DNA, 21 bp, Homo sapiens
tctctcttaasagtatgacca

SEQ ID NO: 10772 - DNA, 21 bp, Homo sapiens
acagctttatragtacagcct

SEQ ID NO: 10773 - DNA, 21 bp, Homo sapiens
agcaagtaagscttttaaaaa

SEQ ID NO: 10774 - DNA, 21 bp, Homo sapiens
gataataaacrtatacagttg

SEQ ID NO: 10775 - DNA, 21 bp, Homo sapiens
ttcactcaagrtgatccagcc

SEQ ID NO: 10776 - DNA, 21 bp, Homo sapiens
tatttgacatmaaaattggaa

SEQ ID NO: 10777 - DNA, 21 bp, Homo sapiens
ccatgggaaaytattgatcag

SEQ ID NO: 10778 - DNA, 21 bp, Homo sapiens
caaagagcctytcagttcctt

SEQ ID NO: 10779 - DNA, 21 bp, Homo sapiens
atgagtggctrtcatgtgtta

SEQ ID NO: 10780 - DNA, 21 bp, Homo sapiens
acttagtaaasggtaacttgg

SEQ ID NO: 10781 - DNA, 21 bp, Homo sapiens
caagttcctcmagtaaaaagt

SEQ ID NO: 10782 - DNA, 21 bp, Homo sapiens
cctcctttaasttggtctgtg

SEQ ID NO: 10783 - DNA, 21 bp, Homo sapiens
caaaataagayccagagatgt

SEQ ID NO: 10784 - DNA, 21 bp, Homo sapiens
aacacaggatrgacaagcaag

SEQ ID NO: 10785 - DNA, 21 bp, Homo sapiens
ctcaccagcaytttccatgat

SEQ ID NO: 10786 - DNA, 21 bp, Homo sapiens
tttaaactccytgatcttaga

SEQ ID NO: 10787 - DNA, 21 bp, Homo sapiens
aagatgggagratggcacttt

SEQ ID NO: 10788 - DNA, 21 bp, Homo sapiens
acttgaacgtrttaatacatt

SEQ ID NO: 10789 - DNA, 21 bp, Homo sapiens
tctattagacrttactagaca

SEQ ID NO: 10790 - DNA, 21 bp, Homo sapiens
ttggagtctayctttgctcca

SEQ ID NO: 10791 - DNA, 21 bp, Homo sapiens
tgtctgtattwagtggtgagc

SEQ ID NO: 10792 - DNA, 21 bp, Homo sapiens
taataaacttytacatgatga

SEQ ID NO: 10793 - DNA, 21 bp, Homo sapiens
cttaagaaatyacttagaaat

SEQ ID NO: 10794 - DNA, 21 bp, Homo sapiens
tccaggaagasagtcattctg

SEQ ID NO: 10795 - DNA, 21 bp, Homo sapiens
tcactgttgtyattactaaac

SEQ ID NO: 10796 - DNA, 21 bp, Homo sapiens
taatgcgctgygtatctgact

SEQ ID NO: 10797 - DNA, 21 bp, Homo sapiens
ggtcctttgayctaggattat

SEQ ID NO: 10798 - DNA, 21 bp, Homo sapiens
acatgggcctkgcagcaagta

SEQ ID NO: 10799 - DNA, 21 bp, Homo sapiens
aaaacaaactstaggtcttaa

SEQ ID NO: 10800 - DNA, 21 bp, Homo sapiens
gtgccacaacrtctacaccag

SEQ ID NO: 10801 - DNA, 21 bp, Homo sapiens
ccgggagagayatattttaaa

SEQ ID NO: 10802 - DNA, 21 bp, Homo sapiens
ctatatcagcwtatcaagcca

SEQ ID NO: 10803 - DNA, 21 bp, Homo sapiens
tcaaatctctytagggtttcc

SEQ ID NO: 10804 - DNA, 21 bp, Homo sapiens
ttatattcttsaatgcttcat

SEQ ID NO: 10805 - DNA, 21 bp, Homo sapiens
aagataaaaamtagccattca

SEQ ID NO: 10806 - DNA, 21 bp, Homo sapiens
gggtctccctmgtgcccagaa

SEQ ID NO: 10807 - DNA, 21 bp, Homo sapiens
aattttggatrtccttgaaga

SEQ ID NO: 10808 - DNA, 21 bp, Homo sapiens
tatgagtagascagaaatcct

SEQ ID NO: 10809 - DNA, 21 bp, Homo sapiens
aaatatgctcytttatcgctt

SEQ ID NO: 10810 - DNA, 21 bp, Homo sapiens
aaccaggaaasagttgctcac

SEQ ID NO: 10811 - DNA, 21 bp, Homo sapiens
cacctatattygaaaacctca

SEQ ID NO: 10812 - DNA, 21 bp, Homo sapiens
atactattagygtcttaaagt

SEQ ID NO: 10813 - DNA, 21 bp, Homo sapiens
aatttgtgtamaactgtgaca

SEQ ID NO: 10814 - DNA, 21 bp, Homo sapiens
acagttctctytgtcttaaaa

SEQ ID NO: 10815 - DNA, 21 bp, Homo sapiens
agagtccctgmcaccccaaga

SEQ ID NO: 10816 - DNA, 21 bp, Homo sapiens
atgttagcaasaaaatgttct

SEQ ID NO: 10817 - DNA, 21 bp, Homo sapiens
tgaatacagtrgttactttag

SEQ ID NO: 10818 - DNA, 21 bp, Homo sapiens
catttattggsaccatattag

SEQ ID NO: 10819 - DNA, 21 bp, Homo sapiens
agagtatctgygccaaggtga

SEQ ID NO: 10820 - DNA, 21 bp, Homo sapiens
agctgaacatkagagggagtt

SEQ ID NO: 10821 - DNA, 21 bp, Homo sapiens
cagtggtagasacaactaaaa

SEQ ID NO: 10822 - DNA, 21 bp, Homo sapiens
ctactttaacwtttctgccct

SEQ ID NO: 10823 - DNA, 21 bp, Homo sapiens
tggctcttatmagagcagtca

SEQ ID NO: 10824 - DNA, 21 bp, Homo sapiens
taagatccaarcccttttcta

SEQ ID NO: 10825 - DNA, 21 bp, Homo sapiens
tccttctacarcttcctatgc

SEQ ID NO: 10826 - DNA, 21 bp, Homo sapiens
aggtcccttakgtagcagagg

SEQ ID NO: 10827 - DNA, 21 bp, Homo sapiens
aaaaatggaaytgctgggaca

SEQ ID NO: 10828 - DNA, 21 bp, Homo sapiens
tctataaaagrgctctgatgg

SEQ ID NO: 10829 - DNA, 21 bp, Homo sapiens
aggagacattmattgattcaa

SEQ ID NO: 10830 - DNA, 21 bp, Homo sapiens
tatacctatamgagacataaa

SEQ ID NO: 10831 - DNA, 21 bp, Homo sapiens
tagccagaatsttttgtcatt

SEQ ID NO: 10832 - DNA, 21 bp, Homo sapiens
aattagtcttygggttttggt

SEQ ID NO: 10833 - DNA, 21 bp, Homo sapiens
tttagtatatktatgggactg

SEQ ID NO: 10834 - DNA, 21 bp, Homo sapiens
gtttttatgartgtgtcactg

SEQ ID NO: 10835 - DNA, 21 bp, Homo sapiens
tggaattattraaagacctag

SEQ ID NO: 10836 - DNA, 21 bp, Homo sapiens
gccaggcagtrtgctcaaagc

SEQ ID NO: 10837 - DNA, 21 bp, Homo sapiens
tctggagtcakacttagtttg

SEQ ID NO: 10838 - DNA, 21 bp, Homo sapiens
cgagttatttrtatatcacag

SEQ ID NO: 10839 - DNA, 21 bp, Homo sapiens
ctatgaattgytcagttctaa

SEQ ID NO: 10840 - DNA, 21 bp, Homo sapiens
cagtaagactycttaccctcg

SEQ ID NO: 10841 - DNA, 21 bp, Homo sapiens
aaaaccattamaactaactgt

SEQ ID NO: 10842 - DNA, 21 bp, Homo sapiens
aacttgaggasttgaccagct

SEQ ID NO: 10843 - DNA, 21 bp, Homo sapiens
tgcttcttacrtgtacacttt

SEQ ID NO: 10844 - DNA, 21 bp, Homo sapiens
agaaagaatgygaggagaaaa

SEQ ID NO: 10845 - DNA, 21 bp, Homo sapiens
ccagcattccrggaaagggga

SEQ ID NO: 10846 - DNA, 21 bp, Homo sapiens
gtgtggccgtyaggcccaagt

SEQ ID NO: 10847 - DNA, 21 bp, Homo sapiens
atgtactatcrgtggctgcct

SEQ ID NO: 10848 - DNA, 21 bp, Homo sapiens
atgaaagttamggatttttga

SEQ ID NO: 10849 - DNA, 21 bp, Homo sapiens
aacacacttgygcagccctga

SEQ ID NO: 10850 - DNA, 21 bp, Homo sapiens
tctaaagtacrctctatttac

SEQ ID NO: 10851 - DNA, 21 bp, Homo sapiens
ctatgtaacgwacttaagaat

SEQ ID NO: 10852 - DNA, 21 bp, Homo sapiens
ggaaatatttrgacgtaagtg

SEQ ID NO: 10853 - DNA, 21 bp, Homo sapiens
acatacccaamtttaggtaaa

SEQ ID NO: 10854 - DNA, 21 bp, Homo sapiens
ctttgaaagaratacctgaca

SEQ ID NO: 10855 - DNA, 21 bp, Homo sapiens
ttttgtggaaraatctatttt

SEQ ID NO: 10856 - DNA, 21 bp, Homo sapiens
tcataattcayggacatagtg

SEQ ID NO: 10857 - DNA, 21 bp, Homo sapiens
tggagaaaatscaactgagcc

SEQ ID NO: 10858 - DNA, 21 bp, Homo sapiens
tgggctaagcmagaggtctta

SEQ ID NO: 10859 - DNA, 21 bp, Homo sapiens
gttttcaaacstatctgaggc

SEQ ID NO: 10860 - DNA, 21 bp, Homo sapiens
gagaatttcayctactattgc

SEQ ID NO: 10861 - DNA, 21 bp, Homo sapiens
ttcctctcaamtaatttctct

SEQ ID NO: 10862 - DNA, 21 bp, Homo sapiens
tttagtctatrtgtgtttaca

SEQ ID NO: 10863 - DNA, 21 bp, Homo sapiens
aaggctgaacrtattaatatg

SEQ ID NO: 10864 - DNA, 21 bp, Homo sapiens
ttaggaaaagrtggtggctat

SEQ ID NO: 10865 - DNA, 21 bp, Homo sapiens
ggcataattgyaggaaccctt

SEQ ID NO: 10866 - DNA, 21 bp, Homo sapiens
tagtaattgtrtatgtattta

SEQ ID NO: 10867 - DNA, 21 bp, Homo sapiens
aaagtattccraaataaattg

SEQ ID NO: 10868 - DNA, 21 bp, Homo sapiens
atttcaaacarttataactga

SEQ ID NO: 10869 - DNA, 21 bp, Homo sapiens
taaaatatgakatatatgctg

SEQ ID NO: 10870 - DNA, 21 bp, Homo sapiens
gggaatttgargtcatttaga

SEQ ID NO: 10871 - DNA, 21 bp, Homo sapiens
catgccaaatkgttggatcct

SEQ ID NO: 10872 - DNA, 21 bp, Homo sapiens
catcatctacrgaataacacc

SEQ ID NO: 10873 - DNA, 21 bp, Homo sapiens
taagagaaagyatcacctcat

SEQ ID NO: 10874 - DNA, 21 bp, Homo sapiens
tagaagctatygtttcttatc

SEQ ID NO: 10875 - DNA, 21 bp, Homo sapiens
gatttcaacawtatcttttcc

SEQ ID NO: 10876 - DNA, 21 bp, Homo sapiens
agaggacttcraaaagaaacg

SEQ ID NO: 10877 - DNA, 21 bp, Homo sapiens
gcctcatggtytgcttgtcct

SEQ ID NO: 10878 - DNA, 21 bp, Homo sapiens
gggatggaaarttcatgagca

SEQ ID NO: 10879 - DNA, 21 bp, Homo sapiens
tatctggcaaratctgtgaag

SEQ ID NO: 10880 - DNA, 21 bp, Homo sapiens
tttttttcaasattatgctga

SEQ ID NO: 10881 - DNA, 21 bp, Homo sapiens
cactgtcatastaaagttata

SEQ ID NO: 10882 - DNA, 21 bp, Homo sapiens
ttaagatactwtgaggcaacg

SEQ ID NO: 10883 - DNA, 21 bp, Homo sapiens
tgaggtttacmttttcatgtt

SEQ ID NO: 10884 - DNA, 21 bp, Homo sapiens
gaaaccataaygtgagactgt

SEQ ID NO: 10885 - DNA, 21 bp, Homo sapiens
ttgattagatscagaaacaaa

SEQ ID NO: 10886 - DNA, 21 bp, Homo sapiens
gatgaagaaargctaaagaaa

SEQ ID NO: 10887 - DNA, 21 bp, Homo sapiens
ctgagagcacwcagagatcag

SEQ ID NO: 10888 - DNA, 21 bp, Homo sapiens
ggcttagagarcatatttata

SEQ ID NO: 10889 - DNA, 21 bp, Homo sapiens
tttagcatccrccacagcaac

SEQ ID NO: 10890 - DNA, 21 bp, Homo sapiens
tctttgcattrttcttataat

SEQ ID NO: 10891 - DNA, 21 bp, Homo sapiens
gcagggacagrcatattcttt

SEQ ID NO: 10892 - DNA, 21 bp, Homo sapiens
gttaactataytcaactgtca

SEQ ID NO: 10893 - DNA, 21 bp, Homo sapiens
agggtgatgtrtagaaaagca

SEQ ID NO: 10894 - DNA, 21 bp, Homo sapiens
aatagaactcrgttctattgt

SEQ ID NO: 10895 - DNA, 21 bp, Homo sapiens
tgaggttcctyatattgaact

SEQ ID NO: 10896 - DNA, 21 bp, Homo sapiens
attaaaacagwcagaattacc

SEQ ID NO: 10897 - DNA, 21 bp, Homo sapiens
aatttgttaamagtttgctgt

SEQ ID NO: 10898 - DNA, 21 bp, Homo sapiens
tattcaaaaamaaacaaacaa

SEQ ID NO: 10899 - DNA, 21 bp, Homo sapiens
ttttatggtcycagaatgcaa

SEQ ID NO: 10900 - DNA, 21 bp, Homo sapiens
tctggaacatyaataagttac

SEQ ID NO: 10901 - DNA, 21 bp, Homo sapiens
acttctaaaarataaaaacgt

SEQ ID NO: 10902 - DNA, 21 bp, Homo sapiens
agtggcgattygtaggaattt

SEQ ID NO: 10903 - DNA, 21 bp, Homo sapiens
aaaaataattrtccttaatgt

SEQ ID NO: 10904 - DNA, 21 bp, Homo sapiens
atcttataaartcagtcacaa

SEQ ID NO: 10905 - DNA, 21 bp, Homo sapiens
tgacatttttrtagaagcaaa

SEQ ID NO: 10906 - DNA, 21 bp, Homo sapiens
aaagtttctcrgcatcttctt

SEQ ID NO: 10907 - DNA, 21 bp, Homo sapiens
atctgatgagkttttaaatta

SEQ ID NO: 10908 - DNA, 21 bp, Homo sapiens
ataaacatatrgagttaaata

SEQ ID NO: 10909 - DNA, 21 bp, Homo sapiens
gtctgaaggartatttctctt

SEQ ID NO: 10910 - DNA, 21 bp, Homo sapiens
cagcagccctrtggaaaagtg

SEQ ID NO: 10911 - DNA, 21 bp, Homo sapiens
cacctaagcgycacctactgt

SEQ ID NO: 10912 - DNA, 21 bp, Homo sapiens
tactgttacaraaaattgagg

SEQ ID NO: 10913 - DNA, 21 bp, Homo sapiens
caaattgcatraagaaaatgt

SEQ ID NO: 10914 - DNA, 21 bp, Homo sapiens
ttgttttatcracttcatata

SEQ ID NO: 10915 - DNA, 21 bp, Homo sapiens
ctcccacaccrggtgagggca

SEQ ID NO: 10916 - DNA, 21 bp, Homo sapiens
agtcctatcarttttccttca

SEQ ID NO: 10917 - DNA, 21 bp, Homo sapiens
ccatgggcctrtgctaccctt

SEQ ID NO: 10918 - DNA, 21 bp, Homo sapiens
tttactaaaawtttctctctt

SEQ ID NO: 10919 - DNA, 21 bp, Homo sapiens
agaatacatarccaccagaat

SEQ ID NO: 10920 - DNA, 21 bp, Homo sapiens
gcaatccagayagaaatcaat

SEQ ID NO: 10921 - DNA, 21 bp, Homo sapiens
ttctctgaaaracaaagaagt

SEQ ID NO: 10922 - DNA, 21 bp, Homo sapiens
aattttatatsaaaaaaatgc

SEQ ID NO: 10923 - DNA, 21 bp, Homo sapiens
gttcctcagtytgattggaat

SEQ ID NO: 10924 - DNA, 21 bp, Homo sapiens
tctttgaaggkttctattttt

SEQ ID NO: 10925 - DNA, 21 bp, Homo sapiens
aaactgacagrctttcagcca

SEQ ID NO: 10926 - DNA, 21 bp, Homo sapiens
gctgctgagtrttaataagca

SEQ ID NO: 10927 - DNA, 21 bp, Homo sapiens
acacaaagaakaaaggccctg

SEQ ID NO: 10928 - DNA, 21 bp, Homo sapiens
aagagtccttygcagtctagt

SEQ ID NO: 10929 - DNA, 21 bp, Homo sapiens
taaacatccgstgtccccaag

SEQ ID NO: 10930 - DNA, 21 bp, Homo sapiens
ctgtgctcctrtgtaggagtg

SEQ ID NO: 10931 - DNA, 21 bp, Homo sapiens
ttagcaggggktgtgatgggt

SEQ ID NO: 10932 - DNA, 21 bp, Homo sapiens
tgccatgtctrcaagttctat

SEQ ID NO: 10933 - DNA, 21 bp, Homo sapiens
ctccattcaaygggtttgctg

SEQ ID NO: 10934 - DNA, 21 bp, Homo sapiens
aatctgatggragtaaaatta

SEQ ID NO: 10935 - DNA, 21 bp, Homo sapiens
ttctctaatgrcaattaaaag

SEQ ID NO: 10936 - DNA, 21 bp, Homo sapiens
agcaatattgrcagtccttta

SEQ ID NO: 10937 - DNA, 21 bp, Homo sapiens
catgccattaygagggttagt

SEQ ID NO: 10938 - DNA, 21 bp, Homo sapiens
aaatgcctgcygaggacccca

SEQ ID NO: 10939 - DNA, 21 bp, Homo sapiens
tctctcttccraccttaaaaa

SEQ ID NO: 10940 - DNA, 21 bp, Homo sapiens
ctcattttttmcaataaagtg

SEQ ID NO: 10941 - DNA, 21 bp, Homo sapiens
taagttttccrtcaacaagaa

SEQ ID NO: 10942 - DNA, 21 bp, Homo sapiens
attttatggastactccctga

SEQ ID NO: 10943 - DNA, 21 bp, Homo sapiens
aattcatacayacaaaaaagt

SEQ ID NO: 10944 - DNA, 21 bp, Homo sapiens
atttaacccayattcattaaa

SEQ ID NO: 10945 - DNA, 21 bp, Homo sapiens
tggtatatgaytacgtttctg

SEQ ID NO: 10946 - DNA, 21 bp, Homo sapiens
ttacaaattaracaaccaagg

SEQ ID NO: 10947 - DNA, 21 bp, Homo sapiens
tatcaactgaygaatgaataa

SEQ ID NO: 10948 - DNA, 21 bp, Homo sapiens
ttacttagagrtttccttctt

SEQ ID NO: 10949 - DNA, 21 bp, Homo sapiens
caggcccaggrtctggcacat

SEQ ID NO: 10950 - DNA, 21 bp, Homo sapiens
agtagcagcayggagtgcact

SEQ ID NO: 10951 - DNA, 21 bp, Homo sapiens
agattactggwgctaatgggt

SEQ ID NO: 10952 - DNA, 21 bp, Homo sapiens
gattacaggamgtttagaagc

SEQ ID NO: 10953 - DNA, 21 bp, Homo sapiens
attttcaaggrtaaacatacg

SEQ ID NO: 10954 - DNA, 21 bp, Homo sapiens
tgaatgctgtrctttgcaaaa

SEQ ID NO: 10955 - DNA, 21 bp, Homo sapiens
ctgagcaagarataaaatcag

SEQ ID NO: 10956 - DNA, 21 bp, Homo sapiens
ctgaaccagasaaagggagaa

SEQ ID NO: 10957 - DNA, 21 bp, Homo sapiens
tgttttaatayactaggaata

SEQ ID NO: 10958 - DNA, 21 bp, Homo sapiens
ttataatctaygttttaaatc

SEQ ID NO: 10959 - DNA, 21 bp, Homo sapiens
gtttacattcwgtctaggtca

SEQ ID NO: 10960 - DNA, 21 bp, Homo sapiens
taaataaccastttatatgta

SEQ ID NO: 10961 - DNA, 21 bp, Homo sapiens
attgtcatgaraataccctgt

SEQ ID NO: 10962 - DNA, 21 bp, Homo sapiens
ttaaataaccyattaactttc

SEQ ID NO: 10963 - DNA, 21 bp, Homo sapiens
ctcttttcttstttctttttc

SEQ ID NO: 10964 - DNA, 21 bp, Homo sapiens
gatcattgtcyggccaaagat

SEQ ID NO: 10965 - DNA, 21 bp, Homo sapiens
ctgtaaatacrtttgatgaaa

SEQ ID NO: 10966 - DNA, 21 bp, Homo sapiens
taaagatgttyttcatcagtt

SEQ ID NO: 10967 - DNA, 21 bp, Homo sapiens
aattatagtcrcagctataaa

SEQ ID NO: 10968 - DNA, 21 bp, Homo sapiens
tagttataaarctggcaaata

SEQ ID NO: 10969 - DNA, 21 bp, Homo sapiens
cctccacaaaytctaatttaa

SEQ ID NO: 10970 - DNA, 21 bp, Homo sapiens
caaatactatrtgattcctct

SEQ ID NO: 10971 - DNA, 21 bp, Homo sapiens
aaaatctctgycgaatctgag

SEQ ID NO: 10972 - DNA, 21 bp, Homo sapiens
gaacagatatrccacacttaa

SEQ ID NO: 10973 - DNA, 21 bp, Homo sapiens
ctgcagacatyaaaaggatac

SEQ ID NO: 10974 - DNA, 21 bp, Homo sapiens
cataggacatrgtaacttact

SEQ ID NO: 10975 - DNA, 21 bp, Homo sapiens
caatatcccarcataatacag

SEQ ID NO: 10976 - DNA, 21 bp, Homo sapiens
ggagttactcktgacatgccc

SEQ ID NO: 10977 - DNA, 21 bp, Homo sapiens
aattgactaamctaagaggaa

SEQ ID NO: 10978 - DNA, 21 bp, Homo sapiens
aatttcacagscagcctagag

SEQ ID NO: 10979 - DNA, 21 bp, Homo sapiens
tatggaccaawggcccagttt

SEQ ID NO: 10980 - DNA, 21 bp, Homo sapiens
agtgaatttgktaactttttt

SEQ ID NO: 10981 - DNA, 21 bp, Homo sapiens
agattgtgaaytgtgataaga

SEQ ID NO: 10982 - DNA, 21 bp, Homo sapiens
gaggactccartgggggcagg

SEQ ID NO: 10983 - DNA, 21 bp, Homo sapiens
ctgcaaagtargaggagcaag

SEQ ID NO: 10984 - DNA, 21 bp, Homo sapiens
tccttaagatrgattttacca

SEQ ID NO: 10985 - DNA, 21 bp, Homo sapiens
agacactggcrattaccagag

SEQ ID NO: 10986 - DNA, 21 bp, Homo sapiens
tatattttgamggtttcacga

SEQ ID NO: 10987 - DNA, 21 bp, Homo sapiens
tatttacctcyctatgcagca

SEQ ID NO: 10988 - DNA, 21 bp, Homo sapiens
ctttgagcctyctcaaaataa

SEQ ID NO: 10989 - DNA, 21 bp, Homo sapiens
tttatcatcasaaaccatgca

SEQ ID NO: 10990 - DNA, 21 bp, Homo sapiens
cctaagatcargaacatgaca

SEQ ID NO: 10991 - DNA, 21 bp, Homo sapiens
gacggccacayaggttatggc

SEQ ID NO: 10992 - DNA, 21 bp, Homo sapiens
cacataaaggrtagccttttt

SEQ ID NO: 10993 - DNA, 21 bp, Homo sapiens
ctctcattacractattacta

SEQ ID NO: 10994 - DNA, 21 bp, Homo sapiens
ctttatttttwaaaaaatgtg

SEQ ID NO: 10995 - DNA, 21 bp, Homo sapiens
taatatgttgwctgcattctg

SEQ ID NO: 10996 - DNA, 21 bp, Homo sapiens
ttactcactawtgtacattac

SEQ ID NO: 10997 - DNA, 21 bp, Homo sapiens
gagtagatgcytggctatcat

SEQ ID NO: 10998 - DNA, 21 bp, Homo sapiens
gaggaaggctsctgaattttc

SEQ ID NO: 10999 - DNA, 21 bp, Homo sapiens
atgatggtatygctgagatca

SEQ ID NO: 11000 - DNA, 21 bp, Homo sapiens
atgcctgcatmatcactgtcc

SEQ ID NO: 11001 - DNA, 21 bp, Homo sapiens
ccattatgaasatttcttgct

SEQ ID NO: 11002 - DNA, 21 bp, Homo sapiens
tatgttgcctrttacagtcat

SEQ ID NO: 11003 - DNA, 21 bp, Homo sapiens
ctattactgaygttgttatct

SEQ ID NO: 11004 - DNA, 21 bp, Homo sapiens
gagtgacaatraagagtttgc

SEQ ID NO: 11005 - DNA, 21 bp, Homo sapiens
tcctatgatcraggtaatgca

SEQ ID NO: 11006 - DNA, 21 bp, Homo sapiens
tacactcaacrttcttgatta

SEQ ID NO: 11007 - DNA, 21 bp, Homo sapiens
agcccagaacycaactccatt

SEQ ID NO: 11008 - DNA, 21 bp, Homo sapiens
aatgaaacaartgacaaatga

SEQ ID NO: 11009 - DNA, 21 bp, Homo sapiens
tgtttaaaaaktatgtctata

SEQ ID NO: 11010 - DNA, 21 bp, Homo sapiens
cccttgccacrccattaggaa

SEQ ID NO: 11011 - DNA, 21 bp, Homo sapiens
tgaatttatarcctaaatttg

SEQ ID NO: 11012 - DNA, 21 bp, Homo sapiens
cgactattacygagtatcctt

SEQ ID NO: 11013 - DNA, 21 bp, Homo sapiens
aacagcctttrctgattatat

SEQ ID NO: 11014 - DNA, 21 bp, Homo sapiens
ttggccacaargagggattct

SEQ ID NO: 11015 - DNA, 21 bp, Homo sapiens
aaaatgcttgsattccaatga

SEQ ID NO: 11016 - DNA, 21 bp, Homo sapiens
agaagacgagyagactgctaa

SEQ ID NO: 11017 - DNA, 21 bp, Homo sapiens
catatcaatgyattgtgattg

SEQ ID NO: 11018 - DNA, 21 bp, Homo sapiens
tgtatattaarggccaattgt

SEQ ID NO: 11019 - DNA, 21 bp, Homo sapiens
atctgtctctyccttttaaaa

SEQ ID NO: 11020 - DNA, 21 bp, Homo sapiens
cagatagtttrgtggagctcc

SEQ ID NO: 11021 - DNA, 21 bp, Homo sapiens
gggagcaggartgagtcccat

SEQ ID NO: 11022 - DNA, 21 bp, Homo sapiens
aggaacaagakagtttgcatg

SEQ ID NO: 11023 - DNA, 21 bp, Homo sapiens
tgccattacaygtcagtcaaa

SEQ ID NO: 11024 - DNA, 21 bp, Homo sapiens
tagacctaagwcagaaaataa

SEQ ID NO: 11025 - DNA, 21 bp, Homo sapiens
caattcctatyaaaatttaac

SEQ ID NO: 11026 - DNA, 21 bp, Homo sapiens
tagaaagagartgtttcctga

SEQ ID NO: 11027 - DNA, 21 bp, Homo sapiens
aactcaaagtrtagaagggtg

SEQ ID NO: 11028 - DNA, 21 bp, Homo sapiens
atgggaccacygtcatataca

SEQ ID NO: 11029 - DNA, 21 bp, Homo sapiens
ggcatacccakgggcacaaat

SEQ ID NO: 11030 - DNA, 21 bp, Homo sapiens
ttactctgcayaagttactag

SEQ ID NO: 11031 - DNA, 21 bp, Homo sapiens
acctatgaatmttggcagatt

SEQ ID NO: 11032 - DNA, 21 bp, Homo sapiens
taacagctctsttcctgatac

SEQ ID NO: 11033 - DNA, 21 bp, Homo sapiens
tttattctttyactatatttt

SEQ ID NO: 11034 - DNA, 21 bp, Homo sapiens
ttcttatagayggtatctctg

SEQ ID NO: 11035 - DNA, 21 bp, Homo sapiens
tgtaatgtacraaaaactgat

SEQ ID NO: 11036 - DNA, 21 bp, Homo sapiens
tctatccttgrctaaacctta

SEQ ID NO: 11037 - DNA, 21 bp, Homo sapiens
aaacgcatctyacagtgtctt

SEQ ID NO: 11038 - DNA, 21 bp, Homo sapiens
ttggatcaacrtcgcatggaa

SEQ ID NO: 11039 - DNA, 21 bp, Homo sapiens
aagagggccarcaactgtgac

SEQ ID NO: 11040 - DNA, 21 bp, Homo sapiens
gtggaagagayagtaatcatt

SEQ ID NO: 11041 - DNA, 21 bp, Homo sapiens
gtggccagacwgcctcttcag

SEQ ID NO: 11042 - DNA, 21 bp, Homo sapiens
ctgggagtaasagggagaaga

SEQ ID NO: 11043 - DNA, 21 bp, Homo sapiens
cttaaacctayatcaacttga

SEQ ID NO: 11044 - DNA, 21 bp, Homo sapiens
aaaaagttcasgcctgttcat

SEQ ID NO: 11045 - DNA, 21 bp, Homo sapiens
ctcatttcacrattatgactg

SEQ ID NO: 11046 - DNA, 21 bp, Homo sapiens
aaattctggtytgccctacta

SEQ ID NO: 11047 - DNA, 21 bp, Homo sapiens
agaaacagtgytatgaaagct

SEQ ID NO: 11048 - DNA, 21 bp, Homo sapiens
cagaacaacayacgacatggg

SEQ ID NO: 11049 - DNA, 21 bp, Homo sapiens
aacactgtgtrctattccagc

SEQ ID NO: 11050 - DNA, 21 bp, Homo sapiens
agtggtgaatsaagatgaaaa

SEQ ID NO: 11051 - DNA, 21 bp, Homo sapiens
gctggtgccastgcctgaaac

SEQ ID NO: 11052 - DNA, 21 bp, Homo sapiens
ctcgttattayatctgatgtt

SEQ ID NO: 11053 - DNA, 21 bp, Homo sapiens
ggtctttctgyactccagctc

SEQ ID NO: 11054 - DNA, 21 bp, Homo sapiens
aatgtggctarttcaagttta

SEQ ID NO: 11055 - DNA, 21 bp, Homo sapiens
ctaccatgttrtcgaacacag

SEQ ID NO: 11056 - DNA, 21 bp, Homo sapiens
ttattccaagyaatgtgtttc

SEQ ID NO: 11057 - DNA, 21 bp, Homo sapiens
atgtgaaaaargtaaattatg

SEQ ID NO: 11058 - DNA, 21 bp, Homo sapiens
ctaaggaatayacaaatggca

SEQ ID NO: 11059 - DNA, 21 bp, Homo sapiens
tcaggtttctrttcttcaacc

SEQ ID NO: 11060 - DNA, 21 bp, Homo sapiens
taagacagaayatataaatat

SEQ ID NO: 11061 - DNA, 21 bp, Homo sapiens
ttgaagacacytgggaccagc

SEQ ID NO: 11062 - DNA, 21 bp, Homo sapiens
tgatttgggcrgttcaaataa

SEQ ID NO: 11063 - DNA, 21 bp, Homo sapiens
ttcctgcttaycaattatttc

SEQ ID NO: 11064 - DNA, 21 bp, Homo sapiens
ggtaaggactsggaatgaaaa

SEQ ID NO: 11065 - DNA, 21 bp, Homo sapiens
taccacatagstcacattttt

SEQ ID NO: 11066 - DNA, 21 bp, Homo sapiens
cagaaataatmgttaaaatgt

SEQ ID NO: 11067 - DNA, 21 bp, Homo sapiens
ttgatgtacayttgagaagct

SEQ ID NO: 11068 - DNA, 21 bp, Homo sapiens
aatgattccaygagtcaataa

SEQ ID NO: 11069 - DNA, 21 bp, Homo sapiens
ttggtgccgtwaagaactagt

SEQ ID NO: 11070 - DNA, 21 bp, Homo sapiens
acttgaggggraaaaaaaaaa

SEQ ID NO: 11071 - DNA, 21 bp, Homo sapiens
ctgtagtcttytctactcccc

SEQ ID NO: 11072 - DNA, 21 bp, Homo sapiens
aggaggtacamaaaggttgac

SEQ ID NO: 11073 - DNA, 21 bp, Homo sapiens
gaaggttataygtgttttgga

SEQ ID NO: 11074 - DNA, 21 bp, Homo sapiens
ttagttctacrgtcttagcaa

SEQ ID NO: 11075 - DNA, 21 bp, Homo sapiens
agcccccttgsatctaaagga

SEQ ID NO: 11076 - DNA, 21 bp, Homo sapiens
atacggtgtaygctgtataaa

SEQ ID NO: 11077 - DNA, 21 bp, Homo sapiens
tccatgatgcrttgttggcta

SEQ ID NO: 11078 - DNA, 21 bp, Homo sapiens
gcgtttccctycagtctctaa

SEQ ID NO: 11079 - DNA, 21 bp, Homo sapiens
ccaaaacttargtgttcactt

SEQ ID NO: 11080 - DNA, 21 bp, Homo sapiens
gtcacaatctyggtaatgata

SEQ ID NO: 11081 - DNA, 21 bp, Homo sapiens
gctgggcctgrttttgcgaga

SEQ ID NO: 11082 - DNA, 21 bp, Homo sapiens
cttaaatattyagcagtcaaa

SEQ ID NO: 11083 - DNA, 21 bp, Homo sapiens
cgtggagtcckcttatgcatt

SEQ ID NO: 11084 - DNA, 21 bp, Homo sapiens
gcattccttcycttggaaatg

SEQ ID NO: 11085 - DNA, 21 bp, Homo sapiens
tcttttagctrtgtgcagtga

SEQ ID NO: 11086 - DNA, 21 bp, Homo sapiens
attttatgcaycagttgcttc

SEQ ID NO: 11087 - DNA, 21 bp, Homo sapiens
atcacatctcrtagaattaat

SEQ ID NO: 11088 - DNA, 21 bp, Homo sapiens
tccccccaaamgaatatcagt

SEQ ID NO: 11089 - DNA, 21 bp, Homo sapiens
ttaaagatgamtgtttttgag

SEQ ID NO: 11090 - DNA, 21 bp, Homo sapiens
tgtagacgtcrgtgcactttg

SEQ ID NO: 11091 - DNA, 21 bp, Homo sapiens
gagtatatgtyctttctaatt

SEQ ID NO: 11092 - DNA, 21 bp, Homo sapiens
ttgtatctcartcttacttca

SEQ ID NO: 11093 - DNA, 21 bp, Homo sapiens
ctgttgttttsgaaccacttg

SEQ ID NO: 11094 - DNA, 21 bp, Homo sapiens
tactggaaaawacatttttct

SEQ ID NO: 11095 - DNA, 21 bp, Homo sapiens
aaaaattaaaygagttgccag

SEQ ID NO: 11096 - DNA, 21 bp, Homo sapiens
aggtccaggtragcatcataa

SEQ ID NO: 11097 - DNA, 21 bp, Homo sapiens
ttattgaagcracagtgtaca

SEQ ID NO: 11098 - DNA, 21 bp, Homo sapiens
gtttcaatttrtgtacaacca

SEQ ID NO: 11099 - DNA, 21 bp, Homo sapiens
gagtagatttkcattaagtaa

SEQ ID NO: 11100 - DNA, 21 bp, Homo sapiens
ttgcattaagyaatttccaac

SEQ ID NO: 11101 - DNA, 21 bp, Homo sapiens
acattgtcatrtattatttct

SEQ ID NO: 11102 - DNA, 21 bp, Homo sapiens
gaatcaaacartatatccttc

SEQ ID NO: 11103 - DNA, 21 bp, Homo sapiens
aatcccacagygttgtctggc

SEQ ID NO: 11104 - DNA, 21 bp, Homo sapiens
aagaaactacrgtactagatt

SEQ ID NO: 11105 - DNA, 21 bp, Homo sapiens
tggtgacacaygccgcaaatt

SEQ ID NO: 11106 - DNA, 21 bp, Homo sapiens
aatgtttagtyctttccattg

SEQ ID NO: 11107 - DNA, 21 bp, Homo sapiens
atcttgctcckagttacaatc

SEQ ID NO: 11108 - DNA, 21 bp, Homo sapiens
ccagacattaygtaagatatg

SEQ ID NO: 11109 - DNA, 21 bp, Homo sapiens
ccatttctatyttatggaggg

SEQ ID NO: 11110 - DNA, 21 bp, Homo sapiens
aataaacaagrgtccaggcaa

SEQ ID NO: 11111 - DNA, 21 bp, Homo sapiens
ggtggttctcygccctccccc

SEQ ID NO: 11112 - DNA, 21 bp, Homo sapiens
tgggatttaartaaaatacac

SEQ ID NO: 11113 - DNA, 21 bp, Homo sapiens
acagagcaaaractgaggaag

SEQ ID NO: 11114 - DNA, 21 bp, Homo sapiens
cctgacagaaygacccaaacc

SEQ ID NO: 11115 - DNA, 21 bp, Homo sapiens
aagtgaatgtrttgtttgaga

SEQ ID NO: 11116 - DNA, 21 bp, Homo sapiens
agggttgatgrtctccctgag

SEQ ID NO: 11117 - DNA, 21 bp, Homo sapiens
ttcactatttrtatttccctt

SEQ ID NO: 11118 - DNA, 21 bp, Homo sapiens
aatagcatatrtacaagcctg

SEQ ID NO: 11119 - DNA, 21 bp, Homo sapiens
tggaaatccaytggcatgggt

SEQ ID NO: 11120 - DNA, 21 bp, Homo sapiens
ggaacacaacygtggttgagg

SEQ ID NO: 11121 - DNA, 21 bp, Homo sapiens
aatgtggtttktgccaggctg

SEQ ID NO: 11122 - DNA, 21 bp, Homo sapiens
ctttaaactcrgaatttataa

SEQ ID NO: 11123 - DNA, 21 bp, Homo sapiens
ccacacaggargaaactgaca

SEQ ID NO: 11124 - DNA, 21 bp, Homo sapiens
taaaagggaasaacaaagaac

SEQ ID NO: 11125 - DNA, 21 bp, Homo sapiens
gaatctctctraacaaatcaa

SEQ ID NO: 11126 - DNA, 21 bp, Homo sapiens
gcttttacttyttccatcttc

SEQ ID NO: 11127 - DNA, 21 bp, Homo sapiens
aaatacttggrgaatgacttg

SEQ ID NO: 11128 - DNA, 21 bp, Homo sapiens
atgcagagatrcctcaaggta

SEQ ID NO: 11129 - DNA, 21 bp, Homo sapiens
tggtatggccygatttgtttt

SEQ ID NO: 11130 - DNA, 21 bp, Homo sapiens
cagccacgagrccattatata

SEQ ID NO: 11131 - DNA, 21 bp, Homo sapiens
ggcatgtgctrccaaaagagc

SEQ ID NO: 11132 - DNA, 21 bp, Homo sapiens
gcacctcaccyccctggagca

SEQ ID NO: 11133 - DNA, 21 bp, Homo sapiens
gtaattagaawaaaggccact

SEQ ID NO: 11134 - DNA, 21 bp, Homo sapiens
tacatcatgtsgatgatttat

SEQ ID NO: 11135 - DNA, 21 bp, Homo sapiens
caaccaccatrgaaagtctat

SEQ ID NO: 11136 - DNA, 21 bp, Homo sapiens
tgtttcttcayggcccttggt

SEQ ID NO: 11137 - DNA, 21 bp, Homo sapiens
tatgtcccccyggagagggct

SEQ ID NO: 11138 - DNA, 21 bp, Homo sapiens
tttttaaactrcctgtggatt

SEQ ID NO: 11139 - DNA, 21 bp, Homo sapiens
tgaccaagcayttctagagac

SEQ ID NO: 11140 - DNA, 21 bp, Homo sapiens
tagcaaagctygacgaatata

SEQ ID NO: 11141 - DNA, 21 bp, Homo sapiens
acctacagcaygaatccctct

SEQ ID NO: 11142 - DNA, 21 bp, Homo sapiens
gctaagtaacwgatgactgta

SEQ ID NO: 11143 - DNA, 21 bp, Homo sapiens
acacatttccrttattatctt

SEQ ID NO: 11144 - DNA, 21 bp, Homo sapiens
tttggattaasagcccccagg

SEQ ID NO: 11145 - DNA, 21 bp, Homo sapiens
tcactcagttrttccaactct

SEQ ID NO: 11146 - DNA, 21 bp, Homo sapiens
aattcccaccwctccatttca

SEQ ID NO: 11147 - DNA, 21 bp, Homo sapiens
gattagagttyactctctcta

SEQ ID NO: 11148 - DNA, 21 bp, Homo sapiens
gctcagtcgtrgcaaccccgt

SEQ ID NO: 11149 - DNA, 21 bp, Homo sapiens
agtcttccacrtggacatgga

SEQ ID NO: 11150 - DNA, 21 bp, Homo sapiens
tgaggacccayggagggagag

SEQ ID NO: 11151 - DNA, 21 bp, Homo sapiens
gaacttctctsatcctcaccc

SEQ ID NO: 11152 - DNA, 21 bp, Homo sapiens
aattcagtcaytgggaagcta

SEQ ID NO: 11153 - DNA, 21 bp, Homo sapiens
ctgtggttcasatcaaatttc

SEQ ID NO: 11154 - DNA, 21 bp, Homo sapiens
ctgagtaaccrttcgttttgg

SEQ ID NO: 11155 - DNA, 21 bp, Homo sapiens
gctgtgatccyggcaggcagg

SEQ ID NO: 11156 - DNA, 21 bp, Homo sapiens
aaattactccsattaatattg

SEQ ID NO: 11157 - DNA, 21 bp, Homo sapiens
agagcttaggrgaagcaagaa

SEQ ID NO: 11158 - DNA, 21 bp, Homo sapiens
tttttttaggrggcatctgga

SEQ ID NO: 11159 - DNA, 21 bp, Homo sapiens
caagatgaatycagatgattt

SEQ ID NO: 11160 - DNA, 21 bp, Homo sapiens
ccaaacaggcrccactgggct

SEQ ID NO: 11161 - DNA, 21 bp, Homo sapiens
gatcagtgacrtcttccagtt

SEQ ID NO: 11162 - DNA, 21 bp, Homo sapiens
tggcttctgcrgttaagactt

SEQ ID NO: 11163 - DNA, 21 bp, Homo sapiens
tgagcctcttmctgagacagg

SEQ ID NO: 11164 - DNA, 21 bp, Homo sapiens
gaagtgatgcyaggctctgct

SEQ ID NO: 11165 - DNA, 21 bp, Homo sapiens
tgaagttctgygtatggtctt

SEQ ID NO: 11166 - DNA, 21 bp, Homo sapiens
acttggaaggraaatgttctt

SEQ ID NO: 11167 - DNA, 21 bp, Homo sapiens
ctcttcctctrttttctttgt

SEQ ID NO: 11168 - DNA, 21 bp, Homo sapiens
tagctttccayactttcagat

SEQ ID NO: 11169 - DNA, 21 bp, Homo sapiens
tggggtggctsttgtcccagg

SEQ ID NO: 11170 - DNA, 21 bp, Homo sapiens
atgagaagaamggtgatgatc

SEQ ID NO: 11171 - DNA, 21 bp, Homo sapiens
ataaatgtttsattttgcttc

SEQ ID NO: 11172 - DNA, 21 bp, Homo sapiens
aaagctcacgycctctcctcc

SEQ ID NO: 11173 - DNA, 21 bp, Homo sapiens
tttgattaccraaagtattta

SEQ ID NO: 11174 - DNA, 21 bp, Homo sapiens
tatctctaaakctcagagagg

SEQ ID NO: 11175 - DNA, 21 bp, Homo sapiens
tatcagggaamaggaggtctg

SEQ ID NO: 11176 - DNA, 21 bp, Homo sapiens
gggtgaatagrccttcctttg

SEQ ID NO: 11177 - DNA, 21 bp, Homo sapiens
agaagagacargaagtaagcc

SEQ ID NO: 11178 - DNA, 21 bp, Homo sapiens
gaatgcttccrtttatccatc

SEQ ID NO: 11179 - DNA, 21 bp, Homo sapiens
taggctgattygtagttgagg

SEQ ID NO: 11180 - DNA, 21 bp, Homo sapiens
cctgtaatctrttggttgaca

SEQ ID NO: 11181 - DNA, 21 bp, Homo sapiens
tctcattaaakaaaaataggt

SEQ ID NO: 11182 - DNA, 21 bp, Homo sapiens
tggaaaggtgractaaacagt

SEQ ID NO: 11183 - DNA, 21 bp, Homo sapiens
gaaaaaatctmatatgagcac

SEQ ID NO: 11184 - DNA, 21 bp, Homo sapiens
ccataatatamaactcaactg

SEQ ID NO: 11185 - DNA, 21 bp, Homo sapiens
gacctgaaacragcttgggta

SEQ ID NO: 11186 - DNA, 21 bp, Homo sapiens
atatccccagwttaaagaaaa

SEQ ID NO: 11187 - DNA, 21 bp, Homo sapiens
atgtgattttktttttaagtc

SEQ ID NO: 11188 - DNA, 21 bp, Homo sapiens
caataacttaygcaagaccta

SEQ ID NO: 11189 - DNA, 21 bp, Homo sapiens
caaacactagrctcggcattc

SEQ ID NO: 11190 - DNA, 21 bp, Homo sapiens
gtaactaaccytcttggtaca

SEQ ID NO: 11191 - DNA, 21 bp, Homo sapiens
atcagaggagkcttccagcaa

SEQ ID NO: 11192 - DNA, 21 bp, Homo sapiens
cagtgataaaygcaatgggac

SEQ ID NO: 11193 - DNA, 21 bp, Homo sapiens
cttctggtttwacaggaagaa

SEQ ID NO: 11194 - DNA, 21 bp, Homo sapiens
cattgggtatrgaacttcacc

SEQ ID NO: 11195 - DNA, 21 bp, Homo sapiens
aagttagagarcttatccagg

SEQ ID NO: 11196 - DNA, 21 bp, Homo sapiens
ggacagttctkagaataaaat

SEQ ID NO: 11197 - DNA, 21 bp, Homo sapiens
agctaaagagkaggaagaaac

SEQ ID NO: 11198 - DNA, 21 bp, Homo sapiens
tattctgaaaytcttctcaaa

SEQ ID NO: 11199 - DNA, 21 bp, Homo sapiens
cagacactgtkcaaggctctc

SEQ ID NO: 11200 - DNA, 21 bp, Homo sapiens
caacatggatktctagctgac

SEQ ID NO: 11201 - DNA, 21 bp, Homo sapiens
tctatacctayacctatgcct

SEQ ID NO: 11202 - DNA, 21 bp, Homo sapiens
tctactgtctscttggctttt

SEQ ID NO: 11203 - DNA, 21 bp, Homo sapiens
tagggtatggygtcctaattc

SEQ ID NO: 11204 - DNA, 21 bp, Homo sapiens
gcctggaaatkgaggctggtc

SEQ ID NO: 11205 - DNA, 21 bp, Homo sapiens
ttagtttcccmtccccgacac

SEQ ID NO: 11206 - DNA, 21 bp, Homo sapiens
gaagaaaattyacaaaagttg

SEQ ID NO: 11207 - DNA, 21 bp, Homo sapiens
ataaaacctgygagccctgtt

SEQ ID NO: 11208 - DNA, 21 bp, Homo sapiens
tagctgataayaacaatacca

SEQ ID NO: 11209 - DNA, 21 bp, Homo sapiens
aggaataaccrctaaaaaaat

SEQ ID NO: 11210 - DNA, 21 bp, Homo sapiens
ccccaccaggkgtgaggaagc

SEQ ID NO: 11211 - DNA, 21 bp, Homo sapiens
aggtgactgtsagacattgaa

SEQ ID NO: 11212 - DNA, 21 bp, Homo sapiens
tttcattttayatgtaagaaa

SEQ ID NO: 11213 - DNA, 21 bp, Homo sapiens
atccatgtccytcctcacata

SEQ ID NO: 11214 - DNA, 21 bp, Homo sapiens
tagagaccatytatctcctgc

SEQ ID NO: 11215 - DNA, 21 bp, Homo sapiens
ccaggaacttsctgttctagg

SEQ ID NO: 11216 - DNA, 21 bp, Homo sapiens
tacttctaaaytgacacttcc

SEQ ID NO: 11217 - DNA, 21 bp, Homo sapiens
attcatttacstcctgtcact

SEQ ID NO: 11218 - DNA, 21 bp, Homo sapiens
atagcccaacwtttatttgaa

SEQ ID NO: 11219 - DNA, 21 bp, Homo sapiens
aaaccaaggcraaaaaaccac

SEQ ID NO: 11220 - DNA, 21 bp, Homo sapiens
ttcctctttcrtatatggcca

SEQ ID NO: 11221 - DNA, 21 bp, Homo sapiens
catttttgtcratttcaggta

SEQ ID NO: 11222 - DNA, 21 bp, Homo sapiens
ccaactaggtmatttatgaat

SEQ ID NO: 11223 - DNA, 21 bp, Homo sapiens
tgtgacaatgrtatctgaccg

SEQ ID NO: 11224 - DNA, 21 bp, Homo sapiens
gtagctccaastctgggtacc

SEQ ID NO: 11225 - DNA, 21 bp, Homo sapiens
ccagcctaccrtatacagcat

SEQ ID NO: 11226 - DNA, 21 bp, Homo sapiens
aattctcttaygatggaagca

SEQ ID NO: 11227 - DNA, 21 bp, Homo sapiens
cattttaaggwtctgataaat

SEQ ID NO: 11228 - DNA, 21 bp, Homo sapiens
actgcctttaytgctgataga

SEQ ID NO: 11229 - DNA, 21 bp, Homo sapiens
gagcccccagytccacagact

SEQ ID NO: 11230 - DNA, 21 bp, Homo sapiens
tgcaaattagrttcaacttct

SEQ ID NO: 11231 - DNA, 21 bp, Homo sapiens
ccaggggaggsgacagctggt

SEQ ID NO: 11232 - DNA, 21 bp, Homo sapiens
ctctactctgyccagaatctt

SEQ ID NO: 11233 - DNA, 21 bp, Homo sapiens
agtttgagctyatcccaccca

SEQ ID NO: 11234 - DNA, 21 bp, Homo sapiens
tgccaggcccygtgctgggca

SEQ ID NO: 11235 - DNA, 21 bp, Homo sapiens
gacttactagmcaaaaacttt

SEQ ID NO: 11236 - DNA, 21 bp, Homo sapiens
ccctaaatctwaacctgtcag

SEQ ID NO: 11237 - DNA, 21 bp, Homo sapiens
attcaggttarccaacagttg

SEQ ID NO: 11238 - DNA, 21 bp, Homo sapiens
gaatatcttcytagctgtttc

SEQ ID NO: 11239 - DNA, 21 bp, Homo sapiens
agtgtataaayatataaaggt

SEQ ID NO: 11240 - DNA, 21 bp, Homo sapiens
tacctactacwtaccacgctc

SEQ ID NO: 11241 - DNA, 21 bp, Homo sapiens
catgcattccrgtcaacgaca

SEQ ID NO: 11242 - DNA, 21 bp, Homo sapiens
gactccactcrtgcacttacc

SEQ ID NO: 11243 - DNA, 21 bp, Homo sapiens
gcttcccttascagggccccc

SEQ ID NO: 11244 - DNA, 21 bp, Homo sapiens
ggtgtgcattyaattaagata

SEQ ID NO: 11245 - DNA, 21 bp, Homo sapiens
acaaaacatcktgtccagaag

SEQ ID NO: 11246 - DNA, 21 bp, Homo sapiens
aagctaatgtyaaaacaaaat

SEQ ID NO: 11247 - DNA, 21 bp, Homo sapiens
ctgctgtttcyctggacaagg

SEQ ID NO: 11248 - DNA, 21 bp, Homo sapiens
ctgtgaacccmgccaccaccc

SEQ ID NO: 11249 - DNA, 21 bp, Homo sapiens
atttttggaaracatagtcag

SEQ ID NO: 11250 - DNA, 21 bp, Homo sapiens
attgtgcctgrgtcctttact

SEQ ID NO: 11251 - DNA, 21 bp, Homo sapiens
tcctcctgttrtcgacttcta

SEQ ID NO: 11252 - DNA, 21 bp, Homo sapiens
ggggtttaatrctcatactgt

SEQ ID NO: 11253 - DNA, 21 bp, Homo sapiens
ttgttatgcgytcgtgaactt

SEQ ID NO: 11254 - DNA, 21 bp, Homo sapiens
agtcagtcccmgtgcaaatat

SEQ ID NO: 11255 - DNA, 21 bp, Homo sapiens
tgtggaggggktgtagctagg

SEQ ID NO: 11256 - DNA, 21 bp, Homo sapiens
tgttaggtccstctcccagac

SEQ ID NO: 11257 - DNA, 21 bp, Homo sapiens
agcattcacayttattaaaat

SEQ ID NO: 11258 - DNA, 21 bp, Homo sapiens
tgtgactatayattgcaaaca

SEQ ID NO: 11259 - DNA, 21 bp, Homo sapiens
ttcagctgccygctgtttgca

SEQ ID NO: 11260 - DNA, 21 bp, Homo sapiens
agctgttgaayttcaaatgcc

SEQ ID NO: 11261 - DNA, 21 bp, Homo sapiens
tggactaagcycatattctta

SEQ ID NO: 11262 - DNA, 21 bp, Homo sapiens
aaataaaaatkttgtcgagca

SEQ ID NO: 11263 - DNA, 21 bp, Homo sapiens
tactgttcatrtctcttttat

SEQ ID NO: 11264 - DNA, 21 bp, Homo sapiens
aaattttagcrtaaaataaag

SEQ ID NO: 11265 - DNA, 21 bp, Homo sapiens
tcacccccaamactggcaacc

SEQ ID NO: 11266 - DNA, 21 bp, Homo sapiens
ctttctttttrtctcctcagg

SEQ ID NO: 11267 - DNA, 21 bp, Homo sapiens
atgtggactcraagtcatctc

SEQ ID NO: 11268 - DNA, 21 bp, Homo sapiens
tgtcctagtargatggaaaga

SEQ ID NO: 11269 - DNA, 21 bp, Homo sapiens
tgaaaagaccmacaaaattga

SEQ ID NO: 11270 - DNA, 21 bp, Homo sapiens
acagggcactraaggacatta

SEQ ID NO: 11271 - DNA, 21 bp, Homo sapiens
gcaaattccasacatatatta

SEQ ID NO: 11272 - DNA, 21 bp, Homo sapiens
aaggttttttwaattactttg

SEQ ID NO: 11273 - DNA, 21 bp, Homo sapiens
tttacactctmcccaacttga

SEQ ID NO: 11274 - DNA, 21 bp, Homo sapiens
atacaagaaaraaacaatacc

SEQ ID NO: 11275 - DNA, 21 bp, Homo sapiens
ctctgtccctyggtgtataag

SEQ ID NO: 11276 - DNA, 21 bp, Homo sapiens
tttgtgcatasacaaatgtaa

SEQ ID NO: 11277 - DNA, 21 bp, Homo sapiens
catgctacggyctaactcgtc

SEQ ID NO: 11278 - DNA, 21 bp, Homo sapiens
taaagtctgtrgttcttcacc

SEQ ID NO: 11279 - DNA, 21 bp, Homo sapiens
gcgggatacarttcagttcct

SEQ ID NO: 11280 - DNA, 21 bp, Homo sapiens
tgtcttgaagmagtgacattg

SEQ ID NO: 11281 - DNA, 21 bp, Homo sapiens
gctatggctgygcaacaatgt

SEQ ID NO: 11282 - DNA, 21 bp, Homo sapiens
tttgtaataaygctttagaag

SEQ ID NO: 11283 - DNA, 21 bp, Homo sapiens
tggaaaagacwtccacaacta

SEQ ID NO: 11284 - DNA, 21 bp, Homo sapiens
caaagtcaagycaagaactca

SEQ ID NO: 11285 - DNA, 21 bp, Homo sapiens
tagccactgtmtttttgctga

SEQ ID NO: 11286 - DNA, 21 bp, Homo sapiens
tcaaaatataytttcagatat

SEQ ID NO: 11287 - DNA, 21 bp, Homo sapiens
aaacaagttartcctgcatct

SEQ ID NO: 11288 - DNA, 21 bp, Homo sapiens
ctgatgaaagwcactgcttgg

SEQ ID NO: 11289 - DNA, 21 bp, Homo sapiens
taatcattaaygtttagaggc

SEQ ID NO: 11290 - DNA, 21 bp, Homo sapiens
agagaagccamtatttcccac

SEQ ID NO: 11291 - DNA, 21 bp, Homo sapiens
tacaagtgtcycttttccaaa

SEQ ID NO: 11292 - DNA, 21 bp, Homo sapiens
ccctattatakcttcttttct

SEQ ID NO: 11293 - DNA, 21 bp, Homo sapiens
ttaaatttcakcttttatttt

SEQ ID NO: 11294 - DNA, 21 bp, Homo sapiens
gtacctactakgaaccaggca

SEQ ID NO: 11295 - DNA, 21 bp, Homo sapiens
tgcttaaagamtctgtggact

SEQ ID NO: 11296 - DNA, 21 bp, Homo sapiens
ttgtaaaatgrgcagggcctt

SEQ ID NO: 11297 - DNA, 21 bp, Homo sapiens
acttcgccagsacaaggcagt

SEQ ID NO: 11298 - DNA, 21 bp, Homo sapiens
ttattttaaaracaagacact

SEQ ID NO: 11299 - DNA, 21 bp, Homo sapiens
acttagtcatyatgtctcctt

SEQ ID NO: 11300 - DNA, 21 bp, Homo sapiens
ccaatgctttsacatcttcgg

SEQ ID NO: 11301 - DNA, 21 bp, Homo sapiens
tcccaaagctsgtagaccaag

SEQ ID NO: 11302 - DNA, 21 bp, Homo sapiens
tgagtgcaccycgtgagaaca

SEQ ID NO: 11303 - DNA, 21 bp, Homo sapiens
aaagtcctccyacacctggga

SEQ ID NO: 11304 - DNA, 21 bp, Homo sapiens
cctgagcaaamcacttagtct

SEQ ID NO: 11305 - DNA, 21 bp, Homo sapiens
attcaatgacrtggtaaaact

SEQ ID NO: 11306 - DNA, 21 bp, Homo sapiens
ccagagagagrgagtgttata

SEQ ID NO: 11307 - DNA, 21 bp, Homo sapiens
ggcaccctcaygtgaatcaaa

SEQ ID NO: 11308 - DNA, 21 bp, Homo sapiens
atctggattgrcatcctggga

SEQ ID NO: 11309 - DNA, 21 bp, Homo sapiens
ccaccagttamattaatgaat

SEQ ID NO: 11310 - DNA, 21 bp, Homo sapiens
ctcacagtggygttttttttt

SEQ ID NO: 11311 - DNA, 21 bp, Homo sapiens
tttaatcatcytgtctcaatt

SEQ ID NO: 11312 - DNA, 21 bp, Homo sapiens
aaatgactctsaggattgtca

SEQ ID NO: 11313 - DNA, 21 bp, Homo sapiens
aaagaatatayagcctccatg

SEQ ID NO: 11314 - DNA, 21 bp, Homo sapiens
taaatagagcrcccatcaccc

SEQ ID NO: 11315 - DNA, 21 bp, Homo sapiens
ctgttgtcacrggaagaagtg

SEQ ID NO: 11316 - DNA, 21 bp, Homo sapiens
attaagcatayggtggcatga

SEQ ID NO: 11317 - DNA, 21 bp, Homo sapiens
ctaacacacgwtgagtgctta

SEQ ID NO: 11318 - DNA, 21 bp, Homo sapiens
ttacttttccragtacccagg

SEQ ID NO: 11319 - DNA, 21 bp, Homo sapiens
ggcgttcgtcyaggatgatga

SEQ ID NO: 11320 - DNA, 21 bp, Homo sapiens
aatgggagggytgaaatactg

SEQ ID NO: 11321 - DNA, 21 bp, Homo sapiens
aggagaaaaaygatatcttaa

SEQ ID NO: 11322 - DNA, 21 bp, Homo sapiens
aactgctactrcgcaacttac

SEQ ID NO: 11323 - DNA, 21 bp, Homo sapiens
ctcattccctyttcccaggct

SEQ ID NO: 11324 - DNA, 21 bp, Homo sapiens
agaatgatatsgtgtgaatct

SEQ ID NO: 11325 - DNA, 21 bp, Homo sapiens
tcacggaaacytgaaaaaagg

SEQ ID NO: 11326 - DNA, 21 bp, Homo sapiens
cttaagaatamccaacattaa

SEQ ID NO: 11327 - DNA, 21 bp, Homo sapiens
tgagaactatscattttgtga

SEQ ID NO: 11328 - DNA, 21 bp, Homo sapiens
cctttttaaaytaataccaga

SEQ ID NO: 11329 - DNA, 21 bp, Homo sapiens
ataaaattgcsaagagttgca

SEQ ID NO: 11330 - DNA, 21 bp, Homo sapiens
taaggtaagakaattgaaagc

SEQ ID NO: 11331 - DNA, 21 bp, Homo sapiens
aaagcacatascaaaagcaaa

SEQ ID NO: 11332 - DNA, 21 bp, Homo sapiens
ctaataaaacmctcaaatgac

SEQ ID NO: 11333 - DNA, 21 bp, Homo sapiens
ggatcttttcrtctcagcttt

SEQ ID NO: 11334 - DNA, 21 bp, Homo sapiens
gataatgaagwaaagatgtct

SEQ ID NO: 11335 - DNA, 21 bp, Homo sapiens
tcattctttcrttgaatatag

SEQ ID NO: 11336 - DNA, 21 bp, Homo sapiens
ttagatacctsagtcccacta

SEQ ID NO: 11337 - DNA, 21 bp, Homo sapiens
taggtagctargggatgctga

SEQ ID NO: 11338 - DNA, 21 bp, Homo sapiens
ggttttcaacrgaaagcaaag

SEQ ID NO: 11339 - DNA, 21 bp, Homo sapiens
catcaatacaygtctgtctaa

SEQ ID NO: 11340 - DNA, 21 bp, Homo sapiens
agttagtcccmccaagagagc

SEQ ID NO: 11341 - DNA, 21 bp, Homo sapiens
accatctatcwcactgaggct

SEQ ID NO: 11342 - DNA, 21 bp, Homo sapiens
tgttcccctcrgcctgtcgcg

SEQ ID NO: 11343 - DNA, 21 bp, Homo sapiens
aatgaaaaatygcatgtaaaa

SEQ ID NO: 11344 - DNA, 21 bp, Homo sapiens
agatttttttwaaaaaaaatt

SEQ ID NO: 11345 - DNA, 21 bp, Homo sapiens
cactgatttarggaaagagat

SEQ ID NO: 11346 - DNA, 21 bp, Homo sapiens
atttgtcctcygaaccatcac

SEQ ID NO: 11347 - DNA, 21 bp, Homo sapiens
taaatatatcrcctctcttaa

SEQ ID NO: 11348 - DNA, 21 bp, Homo sapiens
tagataagtgragagaagcag

SEQ ID NO: 11349 - DNA, 21 bp, Homo sapiens
atggaccatgrttgaaacagg

SEQ ID NO: 11350 - DNA, 21 bp, Homo sapiens
ttttaaaaacrttttggtcag

SEQ ID NO: 11351 - DNA, 21 bp, Homo sapiens
ggggcctgggratcactgtgt

SEQ ID NO: 11352 - DNA, 21 bp, Homo sapiens
cctctatacawgcaactatgc

SEQ ID NO: 11353 - DNA, 21 bp, Homo sapiens
ttccgatgtcycatggtaagg

SEQ ID NO: 11354 - DNA, 21 bp, Homo sapiens
ctgcatgaaayggaatggaag

SEQ ID NO: 11355 - DNA, 21 bp, Homo sapiens
ttagttcttgyagctaatgac

SEQ ID NO: 11356 - DNA, 21 bp, Homo sapiens
ttgatactcaycattattaca

SEQ ID NO: 11357 - DNA, 21 bp, Homo sapiens
ttgaacaaacrttggtaacat

SEQ ID NO: 11358 - DNA, 21 bp, Homo sapiens
agtgcaatggwttaacctaaa

SEQ ID NO: 11359 - DNA, 21 bp, Homo sapiens
agcttattatytagaatatag

SEQ ID NO: 11360 - DNA, 21 bp, Homo sapiens
gtttaatgacygcagggtact

SEQ ID NO: 11361 - DNA, 21 bp, Homo sapiens
ggttattcagsgttaccgctt

SEQ ID NO: 11362 - DNA, 21 bp, Homo sapiens
aatcacatatscaggtttcta

SEQ ID NO: 11363 - DNA, 21 bp, Homo sapiens
tgaacctctcrttttcctgaa

SEQ ID NO: 11364 - DNA, 21 bp, Homo sapiens
aatggaaacaragcagagaat

SEQ ID NO: 11365 - DNA, 21 bp, Homo sapiens
tgtttttgggwtttttcgacc

SEQ ID NO: 11366 - DNA, 21 bp, Homo sapiens
tctttctctaygcatttacac

SEQ ID NO: 11367 - DNA, 21 bp, Homo sapiens
gatataggtgktggtaatata

SEQ ID NO: 11368 - DNA, 21 bp, Homo sapiens
ctgaccaaagygtcccatcta

SEQ ID NO: 11369 - DNA, 21 bp, Homo sapiens
gcaaatgtaamcataaattag

SEQ ID NO: 11370 - DNA, 21 bp, Homo sapiens
agcactcaagytggaaacccg

SEQ ID NO: 11371 - DNA, 21 bp, Homo sapiens
attaactttgyttattaagta

SEQ ID NO: 11372 - DNA, 21 bp, Homo sapiens
ttaaatgcacraactccagca

SEQ ID NO: 11373 - DNA, 21 bp, Homo sapiens
tttctaattgytcttgtgtca

SEQ ID NO: 11374 - DNA, 21 bp, Homo sapiens
tcatgcttaawaatatgggtt

SEQ ID NO: 11375 - DNA, 21 bp, Homo sapiens
agttctatatwtatttaagaa

SEQ ID NO: 11376 - DNA, 21 bp, Homo sapiens
ctaatgttcastaatactctt

SEQ ID NO: 11377 - DNA, 21 bp, Homo sapiens
tattggacacrtgccaggcag

SEQ ID NO: 11378 - DNA, 21 bp, Homo sapiens
cagaaacacaycatttcaagt

SEQ ID NO: 11379 - DNA, 21 bp, Homo sapiens
ctatgagaatsacatatttcg

SEQ ID NO: 11380 - DNA, 21 bp, Homo sapiens
gctgcttacgytggtcagggc

SEQ ID NO: 11381 - DNA, 21 bp, Homo sapiens
tcttaaatgargactgctgaa

SEQ ID NO: 11382 - DNA, 21 bp, Homo sapiens
cccaacatacytcagataaga

SEQ ID NO: 11383 - DNA, 21 bp, Homo sapiens
aagcagacttktagttatgga

SEQ ID NO: 11384 - DNA, 21 bp, Homo sapiens
cttgtttccayaaattttctg

SEQ ID NO: 11385 - DNA, 21 bp, Homo sapiens
ggctacagctstccaactaaa

SEQ ID NO: 11386 - DNA, 21 bp, Homo sapiens
tgtgtctatcsatctgtcaac

SEQ ID NO: 11387 - DNA, 21 bp, Homo sapiens
tgttaaggggyttacaatttt

SEQ ID NO: 11388 - DNA, 21 bp, Homo sapiens
tccaagtttcrgaaattccta

SEQ ID NO: 11389 - DNA, 21 bp, Homo sapiens
agagcaggggygcaatgtcag

SEQ ID NO: 11390 - DNA, 21 bp, Homo sapiens
caggttttgarcaaattaatg

SEQ ID NO: 11391 - DNA, 21 bp, Homo sapiens
gcgggaagaaygggttgccca

SEQ ID NO: 11392 - DNA, 21 bp, Homo sapiens
tttgtgattckcattaaggcc

SEQ ID NO: 11393 - DNA, 21 bp, Homo sapiens
agtcagttctrtttgttatta

SEQ ID NO: 11394 - DNA, 21 bp, Homo sapiens
cacacccagcrtggaagtcat

SEQ ID NO: 11395 - DNA, 21 bp, Homo sapiens
ttgccactctrtgttataaaa

SEQ ID NO: 11396 - DNA, 21 bp, Homo sapiens
ctacagtatcytcactaaaat

SEQ ID NO: 11397 - DNA, 21 bp, Homo sapiens
aacagggacamccctgcctag

SEQ ID NO: 11398 - DNA, 21 bp, Homo sapiens
gggagaaattmtatttcctta

SEQ ID NO: 11399 - DNA, 21 bp, Homo sapiens
ctcatgacttygttattgaca

SEQ ID NO: 11400 - DNA, 21 bp, Homo sapiens
catccttggtytttggattta

SEQ ID NO: 11401 - DNA, 21 bp, Homo sapiens
ttctcttttcmcagacaacca

SEQ ID NO: 11402 - DNA, 21 bp, Homo sapiens
tttaagtattmggtgctgttg

SEQ ID NO: 11403 - DNA, 21 bp, Homo sapiens
tcgttttcttrtttagcggat

SEQ ID NO: 11404 - DNA, 21 bp, Homo sapiens
attattcttgrtactcaatat

SEQ ID NO: 11405 - DNA, 21 bp, Homo sapiens
taattgaaatkcccccccccc

SEQ ID NO: 11406 - DNA, 21 bp, Homo sapiens
gtgtttcttayggacatagct

SEQ ID NO: 11407 - DNA, 21 bp, Homo sapiens
ttctctgttcyaagaccattt

SEQ ID NO: 11408 - DNA, 21 bp, Homo sapiens
tgtctgccccwactccttttc

SEQ ID NO: 11409 - DNA, 21 bp, Homo sapiens
gagcggctcascatcttcctg

SEQ ID NO: 11410 - DNA, 21 bp, Homo sapiens
tacaagaattmtttctttggc

SEQ ID NO: 11411 - DNA, 21 bp, Homo sapiens
taataaatgtrgaaacaaatg

SEQ ID NO: 11412 - DNA, 21 bp, Homo sapiens
ggtgagaccaytgcctatcac

SEQ ID NO: 11413 - DNA, 21 bp, Homo sapiens
atcctacatgyccatgctgaa

SEQ ID NO: 11414 - DNA, 21 bp, Homo sapiens
gctcttcacasttttctttca

SEQ ID NO: 11415 - DNA, 21 bp, Homo sapiens
gaaatggcaakttttctcatg

SEQ ID NO: 11416 - DNA, 21 bp, Homo sapiens
tgggtgttttwtttattgatc

SEQ ID NO: 11417 - DNA, 21 bp, Homo sapiens
gcttttctcayttctcttgag

SEQ ID NO: 11418 - DNA, 21 bp, Homo sapiens
ttgtagtacawgaccccttgt

SEQ ID NO: 11419 - DNA, 21 bp, Homo sapiens
attattttttwttccattctt

SEQ ID NO: 11420 - DNA, 21 bp, Homo sapiens
gaaaatgcccyggctttgcag

SEQ ID NO: 11421 - DNA, 21 bp, Homo sapiens
acagactcctrttggaacttt

SEQ ID NO: 11422 - DNA, 21 bp, Homo sapiens
ctaaagcaatstctcatggca

SEQ ID NO: 11423 - DNA, 21 bp, Homo sapiens
tttgtgagtarttcgtctcct

SEQ ID NO: 11424 - DNA, 21 bp, Homo sapiens
cagttgaccaygagtctggag

SEQ ID NO: 11425 - DNA, 21 bp, Homo sapiens
tagttcatccrtctgaaattc

SEQ ID NO: 11426 - DNA, 21 bp, Homo sapiens
tgccctggcakcttttttctc

SEQ ID NO: 11427 - DNA, 21 bp, Homo sapiens
caccgctataygtctttgaaa

SEQ ID NO: 11428 - DNA, 21 bp, Homo sapiens
gagaagtgagytacactttag

SEQ ID NO: 11429 - DNA, 21 bp, Homo sapiens
aggtttcacgytgctggcaga

SEQ ID NO: 11430 - DNA, 21 bp, Homo sapiens
tattggcatcmtgtaaatgtt

SEQ ID NO: 11431 - DNA, 21 bp, Homo sapiens
tccagcatcascagctattta

SEQ ID NO: 11432 - DNA, 21 bp, Homo sapiens
aaacaacaaaractaaccttt

SEQ ID NO: 11433 - DNA, 21 bp, Homo sapiens
tggagggcaamctggttttta

SEQ ID NO: 11434 - DNA, 21 bp, Homo sapiens
catggctgccyacttaatatt

SEQ ID NO: 11435 - DNA, 21 bp, Homo sapiens
ctagattttgkcagcgttttg

SEQ ID NO: 11436 - DNA, 21 bp, Homo sapiens
tggtatttccmttttgtactt

SEQ ID NO: 11437 - DNA, 21 bp, Homo sapiens
ttgcatttaaygaccaaatct

SEQ ID NO: 11438 - DNA, 21 bp, Homo sapiens
tgagaataagracatgatatt

SEQ ID NO: 11439 - DNA, 21 bp, Homo sapiens
tacttcctctyggtgcttgct

SEQ ID NO: 11440 - DNA, 21 bp, Homo sapiens
ctggcatgctstagatggtcc

SEQ ID NO: 11441 - DNA, 21 bp, Homo sapiens
gtcatcttgtrtaagacttct

SEQ ID NO: 11442 - DNA, 21 bp, Homo sapiens
attcctgctcrtgtcaaggtc

SEQ ID NO: 11443 - DNA, 21 bp, Homo sapiens
ttgctaggtgrtcactttcct

SEQ ID NO: 11444 - DNA, 21 bp, Homo sapiens
cagcattgtgytgaggcactt

SEQ ID NO: 11445 - DNA, 21 bp, Homo sapiens
ttcctttatcrtgtcatctcc

SEQ ID NO: 11446 - DNA, 21 bp, Homo sapiens
tttgatattgkaaacagtatt

SEQ ID NO: 11447 - DNA, 21 bp, Homo sapiens
ctggcttctasgttttgtcag

SEQ ID NO: 11448 - DNA, 21 bp, Homo sapiens
caccgcttccyccttcccacc

SEQ ID NO: 11449 - DNA, 21 bp, Homo sapiens
accttagtctrtgtaaccctc

SEQ ID NO: 11450 - DNA, 21 bp, Homo sapiens
ataaaaaaaawttatgtagga

SEQ ID NO: 11451 - DNA, 21 bp, Homo sapiens
aatttgtatawagcttttctc

SEQ ID NO: 11452 - DNA, 21 bp, Homo sapiens
aaatcacaagmaattctgttg

SEQ ID NO: 11453 - DNA, 21 bp, Homo sapiens
agaggaccacrctgagacaca

SEQ ID NO: 11454 - DNA, 21 bp, Homo sapiens
aaatcaacaasgtatgtttat

SEQ ID NO: 11455 - DNA, 21 bp, Homo sapiens
cactataaaarcaaacaaaca

SEQ ID NO: 11456 - DNA, 21 bp, Homo sapiens
ataccctccaygccatgtgga

SEQ ID NO: 11457 - DNA, 21 bp, Homo sapiens
ttccctgagtygctatcctat

SEQ ID NO: 11458 - DNA, 21 bp, Homo sapiens
ctattcatcamggctgaattc

SEQ ID NO: 11459 - DNA, 21 bp, Homo sapiens
cattgggtgtragaggtgtgg

SEQ ID NO: 11460 - DNA, 21 bp, Homo sapiens
ttcttcctgcyggggtcctgg

SEQ ID NO: 11461 - DNA, 21 bp, Homo sapiens
gcattttctgrgatttactag

SEQ ID NO: 11462 - DNA, 21 bp, Homo sapiens
ggaggtcagaygcttgttcca

SEQ ID NO: 11463 - DNA, 21 bp, Homo sapiens
aattgaaatartagaatgata

SEQ ID NO: 11464 - DNA, 21 bp, Homo sapiens
gagagaataaygtccccagtc

SEQ ID NO: 11465 - DNA, 21 bp, Homo sapiens
ttgtatgtggrcgttcactgt

SEQ ID NO: 11466 - DNA, 21 bp, Homo sapiens
tgggtcttgaraacaaaaata

SEQ ID NO: 11467 - DNA, 21 bp, Homo sapiens
cagatagaatragatgaaggc

SEQ ID NO: 11468 - DNA, 21 bp, Homo sapiens
aaacatgttaygaatttggtg

SEQ ID NO: 11469 - DNA, 21 bp, Homo sapiens
acatttttggyttgtttcccc

SEQ ID NO: 11470 - DNA, 21 bp, Homo sapiens
actcctgtgtsagcagatttc

SEQ ID NO: 11471 - DNA, 21 bp, Homo sapiens
tgacctgaggygcaagctttg

SEQ ID NO: 11472 - DNA, 21 bp, Homo sapiens
ctctgttactsttctggtaat

SEQ ID NO: 11473 - DNA, 21 bp, Homo sapiens
tctaactaagractattaatc

SEQ ID NO: 11474 - DNA, 21 bp, Homo sapiens
gtagagatgtrtgtgaagtac

SEQ ID NO: 11475 - DNA, 21 bp, Homo sapiens
atttctttttytgtggctagt

SEQ ID NO: 11476 - DNA, 21 bp, Homo sapiens
tgctgaacaasgcagatgtta

SEQ ID NO: 11477 - DNA, 21 bp, Homo sapiens
ttggtttaggytgctaagttt

SEQ ID NO: 11478 - DNA, 21 bp, Homo sapiens
caggtctattytaacgcaaag

SEQ ID NO: 11479 - DNA, 21 bp, Homo sapiens
agagcatgtgwttttgaatgt

SEQ ID NO: 11480 - DNA, 21 bp, Homo sapiens
aatattctttygtggttgaat

SEQ ID NO: 11481 - DNA, 21 bp, Homo sapiens
tgagctctctrccttaggcac

SEQ ID NO: 11482 - DNA, 21 bp, Homo sapiens
atggaaaagtytgtggaaaag

SEQ ID NO: 11483 - DNA, 21 bp, Homo sapiens
ttagatgaacwctgttgtggt

SEQ ID NO: 11484 - DNA, 21 bp, Homo sapiens
tggctgtcttmagatatctat

SEQ ID NO: 11485 - DNA, 21 bp, Homo sapiens
tcatttaaagmatcattgata

SEQ ID NO: 11486 - DNA, 21 bp, Homo sapiens
ccctgatgacmttctaaagag

SEQ ID NO: 11487 - DNA, 21 bp, Homo sapiens
actgcaaatcytggagcaaat

SEQ ID NO: 11488 - DNA, 21 bp, Homo sapiens
aattgaccagycttagccact

SEQ ID NO: 11489 - DNA, 21 bp, Homo sapiens
tattgatgcgscagtgtacaa

SEQ ID NO: 11490 - DNA, 21 bp, Homo sapiens
ttaagaaggtmatataaccct

SEQ ID NO: 11491 - DNA, 21 bp, Homo sapiens
ctttctgatarcagtgataag

SEQ ID NO: 11492 - DNA, 21 bp, Homo sapiens
tttttgtttcrtgtcccatcc

SEQ ID NO: 11493 - DNA, 21 bp, Homo sapiens
ggtggggtgcyagcaggtgcc

SEQ ID NO: 11494 - DNA, 21 bp, Homo sapiens
tgtgtttataygcataataaa

SEQ ID NO: 11495 - DNA, 21 bp, Homo sapiens
atctcaaaackgtgtgtcatt

SEQ ID NO: 11496 - DNA, 21 bp, Homo sapiens
ccctagttccrttaaaaaata

SEQ ID NO: 11497 - DNA, 21 bp, Homo sapiens
aatatataggyttggagtgtt

SEQ ID NO: 11498 - DNA, 21 bp, Homo sapiens
acatttttctstccatccaga

SEQ ID NO: 11499 - DNA, 21 bp, Homo sapiens
atggactgttytagacattga

SEQ ID NO: 11500 - DNA, 21 bp, Homo sapiens
ctttgtctcawttcatcctca

SEQ ID NO: 11501 - DNA, 21 bp, Homo sapiens
atgatggaagrtgagcatggt

SEQ ID NO: 11502 - DNA, 21 bp, Homo sapiens
caattaagtgyatccaagtta

SEQ ID NO: 11503 - DNA, 21 bp, Homo sapiens
aagtattgggrggtgggagaa

SEQ ID NO: 11504 - DNA, 21 bp, Homo sapiens
gggcaaaacaytctccttacc

SEQ ID NO: 11505 - DNA, 21 bp, Homo sapiens
aaatatttttwaaaaaatcaa

SEQ ID NO: 11506 - DNA, 21 bp, Homo sapiens
tgtctggtatwaacatctggg

SEQ ID NO: 11507 - DNA, 21 bp, Homo sapiens
cagtacagaarttcttcctcg

SEQ ID NO: 11508 - DNA, 21 bp, Homo sapiens
tgtcactttcrtttaacctgt

SEQ ID NO: 11509 - DNA, 21 bp, Homo sapiens
ggaggtttaayatcccctgcc

SEQ ID NO: 11510 - DNA, 21 bp, Homo sapiens
cagtggtgtgsattgggacca

SEQ ID NO: 11511 - DNA, 21 bp, Homo sapiens
aatgtttggtyggatagtctt

SEQ ID NO: 11512 - DNA, 21 bp, Homo sapiens
tggcttatttwaaaaacaaca

SEQ ID NO: 11513 - DNA, 21 bp, Homo sapiens
gttaaattttrtttttatatc

SEQ ID NO: 11514 - DNA, 21 bp, Homo sapiens
tagggactcartagacaatga

SEQ ID NO: 11515 - DNA, 21 bp, Homo sapiens
tatccacacaygtttgaatat

SEQ ID NO: 11516 - DNA, 21 bp, Homo sapiens
aggcttcattmcaccaaagaa

SEQ ID NO: 11517 - DNA, 21 bp, Homo sapiens
tatgagggtckatctggaaaa

SEQ ID NO: 11518 - DNA, 21 bp, Homo sapiens
gtctcttacayacacacctgc

SEQ ID NO: 11519 - DNA, 21 bp, Homo sapiens
tttagaagaawttacctggaa

SEQ ID NO: 11520 - DNA, 21 bp, Homo sapiens
aaagaagtttkctgggcaaaa

SEQ ID NO: 11521 - DNA, 21 bp, Homo sapiens
acaacagaagmatattcagct

SEQ ID NO: 11522 - DNA, 21 bp, Homo sapiens
aaactggagtmggctttcacc

SEQ ID NO: 11523 - DNA, 21 bp, Homo sapiens
ccggaaataaytggttttctt

SEQ ID NO: 11524 - DNA, 21 bp, Homo sapiens
gtcgtgagtayagcatggttc

SEQ ID NO: 11525 - DNA, 21 bp, Homo sapiens
aattttgcatygcttcttttt

SEQ ID NO: 11526 - DNA, 21 bp, Homo sapiens
cagtagggccyggaaccagcc

SEQ ID NO: 11527 - DNA, 21 bp, Homo sapiens
tttggcaaaayttcctgcctt

SEQ ID NO: 11528 - DNA, 21 bp, Homo sapiens
ttgaattacayagggttgatc

SEQ ID NO: 11529 - DNA, 21 bp, Homo sapiens
gttagattggmaaaaaacaaa

SEQ ID NO: 11530 - DNA, 21 bp, Homo sapiens
cgccggacctygtggatgcaa

SEQ ID NO: 11531 - DNA, 21 bp, Homo sapiens
ctattgaccayctccttgcaa

SEQ ID NO: 11532 - DNA, 21 bp, Homo sapiens
aactacataartttgttaaaa

SEQ ID NO: 11533 - DNA, 21 bp, Homo sapiens
acatcctcgcygacacttggt

SEQ ID NO: 11534 - DNA, 21 bp, Homo sapiens
tatctctgcaraaaagaatca

SEQ ID NO: 11535 - DNA, 21 bp, Homo sapiens
atgcaattttrtacttgaaaa

SEQ ID NO: 11536 - DNA, 21 bp, Homo sapiens
acatggaggcrgatgacattt

SEQ ID NO: 11537 - DNA, 21 bp, Homo sapiens
actttactcayatcatttatg

SEQ ID NO: 11538 - DNA, 21 bp, Homo sapiens
attttcaattkttagtattta

SEQ ID NO: 11539 - DNA, 21 bp, Homo sapiens
tttaatatatmtcagcaatgt

SEQ ID NO: 11540 - DNA, 21 bp, Homo sapiens
cttgggggaawaaagtttaga

SEQ ID NO: 11541 - DNA, 21 bp, Homo sapiens
gtagatttacwtgaaggtccc

SEQ ID NO: 11542 - DNA, 21 bp, Homo sapiens
aatttcataamcatacttatt

SEQ ID NO: 11543 - DNA, 21 bp, Homo sapiens
gctatggcttrtaactggaaa

SEQ ID NO: 11544 - DNA, 21 bp, Homo sapiens
caaatatcatratttcccata

SEQ ID NO: 11545 - DNA, 21 bp, Homo sapiens
aaataagataycacatgcatg

SEQ ID NO: 11546 - DNA, 21 bp, Homo sapiens
tggctccaccrcatcccttat

SEQ ID NO: 11547 - DNA, 21 bp, Homo sapiens
agcccatgagsagtgtggaga

SEQ ID NO: 11548 - DNA, 21 bp, Homo sapiens
actgaaccaamcttgcctgca

SEQ ID NO: 11549 - DNA, 21 bp, Homo sapiens
gattcctttcyggtaacagtc

SEQ ID NO: 11550 - DNA, 21 bp, Homo sapiens
gtcctaggccmtgaggataca

SEQ ID NO: 11551 - DNA, 21 bp, Homo sapiens
agcacaatatkaaagggggag

SEQ ID NO: 11552 - DNA, 21 bp, Homo sapiens
agctgaaatgrtatcaccaat

SEQ ID NO: 11553 - DNA, 21 bp, Homo sapiens
attttttaacrctcttgtaca

SEQ ID NO: 11554 - DNA, 21 bp, Homo sapiens
tccttgctaasttgacttcat

SEQ ID NO: 11555 - DNA, 21 bp, Homo sapiens
aacaactaggrtgactataat

SEQ ID NO: 11556 - DNA, 21 bp, Homo sapiens
agacaggaacytggctgcagt

SEQ ID NO: 11557 - DNA, 21 bp, Homo sapiens
ttcttttgctragtaagttgt

SEQ ID NO: 11558 - DNA, 21 bp, Homo sapiens
actgaaaaggytcctaccact

SEQ ID NO: 11559 - DNA, 21 bp, Homo sapiens
acagataggcmagatcaccac

SEQ ID NO: 11560 - DNA, 21 bp, Homo sapiens
caggttcccaytggtttttga

SEQ ID NO: 11561 - DNA, 21 bp, Homo sapiens
tgaaattgttmaccaagatca

SEQ ID NO: 11562 - DNA, 21 bp, Homo sapiens
ttctaaattcygcagtatagg

SEQ ID NO: 11563 - DNA, 21 bp, Homo sapiens
tgtttaacaartctcactatc

SEQ ID NO: 11564 - DNA, 21 bp, Homo sapiens
ctgccccagtrcccctaaagg

SEQ ID NO: 11565 - DNA, 21 bp, Homo sapiens
tacagctgtgmaacagacaaa

SEQ ID NO: 11566 - DNA, 21 bp, Homo sapiens
tgtgaaaactkacatctgtca

SEQ ID NO: 11567 - DNA, 21 bp, Homo sapiens
ttggaaagctraccctgtgga

SEQ ID NO: 11568 - DNA, 21 bp, Homo sapiens
ggagtgggtgracgcccgttc

SEQ ID NO: 11569 - DNA, 21 bp, Homo sapiens
aagatggaccrctcctaatta

SEQ ID NO: 11570 - DNA, 21 bp, Homo sapiens
acgaaaatagmagcatctgtt

SEQ ID NO: 11571 - DNA, 21 bp, Homo sapiens
cataccaggcrtgcagactaa

SEQ ID NO: 11572 - DNA, 21 bp, Homo sapiens
ccccgccttcrttcaagatca

SEQ ID NO: 11573 - DNA, 21 bp, Homo sapiens
aaaagggcctraactgggtga

SEQ ID NO: 11574 - DNA, 21 bp, Homo sapiens
tttaagacacragcttcaaaa

SEQ ID NO: 11575 - DNA, 21 bp, Homo sapiens
ttacctgtccygagctgatgg

SEQ ID NO: 11576 - DNA, 21 bp, Homo sapiens
ataaaacttgrcttctggtgc

SEQ ID NO: 11577 - DNA, 21 bp, Homo sapiens
cccgccgcagytccatccaca

SEQ ID NO: 11578 - DNA, 21 bp, Homo sapiens
actacaccttmctgaattaat

SEQ ID NO: 11579 - DNA, 21 bp, Homo sapiens
catggcatatyaactgtttaa

SEQ ID NO: 11580 - DNA, 21 bp, Homo sapiens
atgatttaccycttgtacttc

SEQ ID NO: 11581 - DNA, 21 bp, Homo sapiens
atatcaattaytctactgagc

SEQ ID NO: 11582 - DNA, 21 bp, Homo sapiens
cttcttttctrccatgtgagg

SEQ ID NO: 11583 - DNA, 21 bp, Homo sapiens
ctagaagaagwttggcaagta

SEQ ID NO: 11584 - DNA, 21 bp, Homo sapiens
ggcctccaagygtctctatga

SEQ ID NO: 11585 - DNA, 21 bp, Homo sapiens
attctattacrtcaaattctt

SEQ ID NO: 11586 - DNA, 21 bp, Homo sapiens
ggaactacaartgtccatagc

SEQ ID NO: 11587 - DNA, 21 bp, Homo sapiens
cccctcacacycccacccagg

SEQ ID NO: 11588 - DNA, 21 bp, Homo sapiens
tttttaagtgsgataataaat

SEQ ID NO: 11589 - DNA, 21 bp, Homo sapiens
cagccatggcyaaaagggcac

SEQ ID NO: 11590 - DNA, 21 bp, Homo sapiens
tatgcaaaaamatttctatgt

SEQ ID NO: 11591 - DNA, 21 bp, Homo sapiens
agagagaaaayagactgaaaa

SEQ ID NO: 11592 - DNA, 21 bp, Homo sapiens
ttcataaccartaatttgatc

SEQ ID NO: 11593 - DNA, 21 bp, Homo sapiens
aagtacagagytggctgcaca

SEQ ID NO: 11594 - DNA, 21 bp, Homo sapiens
agacataaaargagccaagga

SEQ ID NO: 11595 - DNA, 21 bp, Homo sapiens
gaaagcaacamaaaggggtac

SEQ ID NO: 11596 - DNA, 21 bp, Homo sapiens
gttccatatcragatatttgg

SEQ ID NO: 11597 - DNA, 21 bp, Homo sapiens
gctgtcactcwccacaggcca

SEQ ID NO: 11598 - DNA, 21 bp, Homo sapiens
tcgacaatttkgcactcaaaa

SEQ ID NO: 11599 - DNA, 21 bp, Homo sapiens
taggactctcrgtgcagcttg

SEQ ID NO: 11600 - DNA, 21 bp, Homo sapiens
attcatgagtrctctgccctc

SEQ ID NO: 11601 - DNA, 21 bp, Homo sapiens
aaatgccatcsgatcaccttt

SEQ ID NO: 11602 - DNA, 21 bp, Homo sapiens
agacaatcacrttcctcaaaa

SEQ ID NO: 11603 - DNA, 21 bp, Homo sapiens
ggacagagtckgcaacataga

SEQ ID NO: 11604 - DNA, 21 bp, Homo sapiens
aaatgactacyatgaaaggaa

SEQ ID NO: 11605 - DNA, 21 bp, Homo sapiens
agtaatattgwctagaaagac

SEQ ID NO: 11606 - DNA, 21 bp, Homo sapiens
tgtggcacagygaacaggact

SEQ ID NO: 11607 - DNA, 21 bp, Homo sapiens
tcccttaccayttaccgtgcc

SEQ ID NO: 11608 - DNA, 21 bp, Homo sapiens
taataaatgtyaatgaattaa

SEQ ID NO: 11609 - DNA, 21 bp, Homo sapiens
ttacagatgcrgacagaatct

SEQ ID NO: 11610 - DNA, 21 bp, Homo sapiens
tagctccgccrtctccctcct

SEQ ID NO: 11611 - DNA, 21 bp, Homo sapiens
agtatctctgragaatgtcta

SEQ ID NO: 11612 - DNA, 21 bp, Homo sapiens
ttacagtggtrcaaaagcgat

SEQ ID NO: 11613 - DNA, 21 bp, Homo sapiens
ctccttgcgtrcactcttgaa

SEQ ID NO: 11614 - DNA, 21 bp, Homo sapiens
aaaaattgttygaagagccaa

SEQ ID NO: 11615 - DNA, 21 bp, Homo sapiens
tgtcataaagygttttccctg

SEQ ID NO: 11616 - DNA, 21 bp, Homo sapiens
tgccagcacarggggaggaga

SEQ ID NO: 11617 - DNA, 21 bp, Homo sapiens
caaacatgaaygtaaatattt

SEQ ID NO: 11618 - DNA, 21 bp, Homo sapiens
taccaaaagamtgaaagctga

SEQ ID NO: 11619 - DNA, 21 bp, Homo sapiens
ttacaaattgkaagacccaac

SEQ ID NO: 11620 - DNA, 21 bp, Homo sapiens
tgtaataccascacattaata

SEQ ID NO: 11621 - DNA, 21 bp, Homo sapiens
ctgacctcctyggttgctttc

SEQ ID NO: 11622 - DNA, 21 bp, Homo sapiens
ctccacacacwtacctctcca

SEQ ID NO: 11623 - DNA, 21 bp, Homo sapiens
aacttgtgcarggctcagagg

SEQ ID NO: 11624 - DNA, 21 bp, Homo sapiens
tatctcagacygacagttgta

SEQ ID NO: 11625 - DNA, 21 bp, Homo sapiens
ttctaaaagtmaactacacat

SEQ ID NO: 11626 - DNA, 21 bp, Homo sapiens
tccaaatttcmaaagtacttg

SEQ ID NO: 11627 - DNA, 21 bp, Homo sapiens
cacatcagggsccccaggtgg

SEQ ID NO: 11628 - DNA, 21 bp, Homo sapiens
acgatcattaraactacaact

SEQ ID NO: 11629 - DNA, 21 bp, Homo sapiens
gtatttttatstcagcctagg

SEQ ID NO: 11630 - DNA, 21 bp, Homo sapiens
aatatacttgytttcctttcc

SEQ ID NO: 11631 - DNA, 21 bp, Homo sapiens
gaacacatccrgctgcagttc

SEQ ID NO: 11632 - DNA, 21 bp, Homo sapiens
ccaggaggacraaagcaccat

SEQ ID NO: 11633 - DNA, 21 bp, Homo sapiens
gactgtgaacrtctacactga

SEQ ID NO: 11634 - DNA, 21 bp, Homo sapiens
taaatgcctarcccttaagga

SEQ ID NO: 11635 - DNA, 21 bp, Homo sapiens
ctcaggttttyactactgaca

SEQ ID NO: 11636 - DNA, 21 bp, Homo sapiens
accacagcagyactcctggat

SEQ ID NO: 11637 - DNA, 21 bp, Homo sapiens
agtggcttctwcttgtcttaa

SEQ ID NO: 11638 - DNA, 21 bp, Homo sapiens
agagacaacaygggatggcag

SEQ ID NO: 11639 - DNA, 21 bp, Homo sapiens
actgtacaaastgaaaagtgt

SEQ ID NO: 11640 - DNA, 21 bp, Homo sapiens
aaggcagggaraaagaaagga

SEQ ID NO: 11641 - DNA, 21 bp, Homo sapiens
aaacaggctgrgtggcctcct

SEQ ID NO: 11642 - DNA, 21 bp, Homo sapiens
tttctgtatayttcaaaagtg

SEQ ID NO: 11643 - DNA, 21 bp, Homo sapiens
aactattgtaytgagcagcac

SEQ ID NO: 11644 - DNA, 21 bp, Homo sapiens
tgtacattaamaaactaccac

SEQ ID NO: 11645 - DNA, 21 bp, Homo sapiens
attgttgccaygtcagaatga

SEQ ID NO: 11646 - DNA, 21 bp, Homo sapiens
attaataagcmtatgaagaaa

SEQ ID NO: 11647 - DNA, 21 bp, Homo sapiens
aattcatgaarcaaaaattga

SEQ ID NO: 11648 - DNA, 21 bp, Homo sapiens
cagtgaaaaayaaaggaagag

SEQ ID NO: 11649 - DNA, 21 bp, Homo sapiens
tccttttcacrtttccccctt

SEQ ID NO: 11650 - DNA, 21 bp, Homo sapiens
aaggtgacaamtgctatgaat

SEQ ID NO: 11651 - DNA, 21 bp, Homo sapiens
tgggcaaccartaagaccacc

SEQ ID NO: 11652 - DNA, 21 bp, Homo sapiens
gcaaactgagsattaaataaa

SEQ ID NO: 11653 - DNA, 21 bp, Homo sapiens
aaaataagtakgcaataaacg

SEQ ID NO: 11654 - DNA, 21 bp, Homo sapiens
agtaaaaactrgaacaagaat

SEQ ID NO: 11655 - DNA, 21 bp, Homo sapiens
cacgaagacayagagctagaa

SEQ ID NO: 11656 - DNA, 21 bp, Homo sapiens
gtgaaaagtasaaaagatatt

SEQ ID NO: 11657 - DNA, 21 bp, Homo sapiens
gccaagttctwaactcagcat

SEQ ID NO: 11658 - DNA, 21 bp, Homo sapiens
aatgtttattsatcacctggc

SEQ ID NO: 11659 - DNA, 21 bp, Homo sapiens
caccctggggyagactaaaat

SEQ ID NO: 11660 - DNA, 21 bp, Homo sapiens
ccatgggtaaygaagaacaga

SEQ ID NO: 11661 - DNA, 21 bp, Homo sapiens
ccttcagtcartggccccaca

SEQ ID NO: 11662 - DNA, 21 bp, Homo sapiens
agaaccaaatrtggacaactg

SEQ ID NO: 11663 - DNA, 21 bp, Homo sapiens
gttctttatcragactgtttt

SEQ ID NO: 11664 - DNA, 21 bp, Homo sapiens
tattgagaggrtaaaagacag

SEQ ID NO: 11665 - DNA, 21 bp, Homo sapiens
tcgggatgccragccagtaaa

SEQ ID NO: 11666 - DNA, 21 bp, Homo sapiens
aacttttcatrttctatttat

SEQ ID NO: 11667 - DNA, 21 bp, Homo sapiens
ggtgtgcactstttactgtgt

SEQ ID NO: 11668 - DNA, 21 bp, Homo sapiens
gtatctaaaayactgtttcca

SEQ ID NO: 11669 - DNA, 21 bp, Homo sapiens
ccaattccagkagctttaaat

SEQ ID NO: 11670 - DNA, 21 bp, Homo sapiens
tacacaacatytccttatgac

SEQ ID NO: 11671 - DNA, 21 bp, Homo sapiens
cctctgcggcytcgcgtcggt

SEQ ID NO: 11672 - DNA, 21 bp, Homo sapiens
agacagaaggwcagggcatta

SEQ ID NO: 11673 - DNA, 21 bp, Homo sapiens
tttataacttytttcaccata

SEQ ID NO: 11674 - DNA, 21 bp, Homo sapiens
ccctgcgaagrgtccaaagcg

SEQ ID NO: 11675 - DNA, 21 bp, Homo sapiens
tggagaggaasttcttcagca

SEQ ID NO: 11676 - DNA, 21 bp, Homo sapiens
tttctaaaagyttggtaggtc

SEQ ID NO: 11677 - DNA, 21 bp, Homo sapiens
actcctccacrcccctcacag

SEQ ID NO: 11678 - DNA, 21 bp, Homo sapiens
tctaccatcartaaaaaagca

SEQ ID NO: 11679 - DNA, 21 bp, Homo sapiens
tccagttgacytcccctacta

SEQ ID NO: 11680 - DNA, 21 bp, Homo sapiens
caatagataayggagatacag

SEQ ID NO: 11681 - DNA, 21 bp, Homo sapiens
aattttctctwttgtattttt

SEQ ID NO: 11682 - DNA, 21 bp, Homo sapiens
atgattctatrtctttctgga

SEQ ID NO: 11683 - DNA, 21 bp, Homo sapiens
agctgtctccstgtggtaccc

SEQ ID NO: 11684 - DNA, 21 bp, Homo sapiens
gaattggactygaggcactcc

SEQ ID NO: 11685 - DNA, 21 bp, Homo sapiens
taagataggtsttaaaggtta

SEQ ID NO: 11686 - DNA, 21 bp, Homo sapiens
aattatgaatyggaatggtaa

SEQ ID NO: 11687 - DNA, 21 bp, Homo sapiens
ctaagtataawtgaacacaat

SEQ ID NO: 11688 - DNA, 21 bp, Homo sapiens
ataacttgcayttatactaca

SEQ ID NO: 11689 - DNA, 21 bp, Homo sapiens
attataaaacyattagttatt

SEQ ID NO: 11690 - DNA, 21 bp, Homo sapiens
tgcctcctgtygccccctttc

SEQ ID NO: 11691 - DNA, 21 bp, Homo sapiens
ttggtaccagygggccaattc

SEQ ID NO: 11692 - DNA, 21 bp, Homo sapiens
gtaacaagatrgtatattcca

SEQ ID NO: 11693 - DNA, 21 bp, Homo sapiens
atctcattctraacatagtaa

SEQ ID NO: 11694 - DNA, 21 bp, Homo sapiens
catactggctycaactttagg

SEQ ID NO: 11695 - DNA, 21 bp, Homo sapiens
gttgagcaaayctattggcgc

SEQ ID NO: 11696 - DNA, 21 bp, Homo sapiens
tgtattttgtmatctcttcta

SEQ ID NO: 11697 - DNA, 21 bp, Homo sapiens
aatatttcaayagcccaaaga

SEQ ID NO: 11698 - DNA, 21 bp, Homo sapiens
tatacagtgtrgctttgacta

SEQ ID NO: 11699 - DNA, 21 bp, Homo sapiens
aagcataaaaytcactactgt

SEQ ID NO: 11700 - DNA, 21 bp, Homo sapiens
ctatacattcytctacatgga

SEQ ID NO: 11701 - DNA, 21 bp, Homo sapiens
acttgtttcayaggcatctca

SEQ ID NO: 11702 - DNA, 21 bp, Homo sapiens
tcatgctcccyaatttgtgtg

SEQ ID NO: 11703 - DNA, 21 bp, Homo sapiens
tgaagtcttcratcccttatc

SEQ ID NO: 11704 - DNA, 21 bp, Homo sapiens
taaatatgaayttatcttctc

SEQ ID NO: 11705 - DNA, 21 bp, Homo sapiens
caaaaatgttsatcacctcaa

SEQ ID NO: 11706 - DNA, 21 bp, Homo sapiens
tatgcatttcmtatagataac

SEQ ID NO: 11707 - DNA, 21 bp, Homo sapiens
tggaacccacrggaatgtgaa

SEQ ID NO: 11708 - DNA, 21 bp, Homo sapiens
acatcctgtakagtccattac

SEQ ID NO: 11709 - DNA, 21 bp, Homo sapiens
atccacttcayacaatccttt

SEQ ID NO: 11710 - DNA, 21 bp, Homo sapiens
gttacctgtgraaaggaagcc

SEQ ID NO: 11711 - DNA, 21 bp, Homo sapiens
ggaacacacaygcttgcccac

SEQ ID NO: 11712 - DNA, 21 bp, Homo sapiens
taactgaaacyatgggaagca

SEQ ID NO: 11713 - DNA, 21 bp, Homo sapiens
gccactagttytcttatcaaa

SEQ ID NO: 11714 - DNA, 21 bp, Homo sapiens
taatggcctascatgtgatct

SEQ ID NO: 11715 - DNA, 21 bp, Homo sapiens
ttgtggcaaayggctggaaat

SEQ ID NO: 11716 - DNA, 21 bp, Homo sapiens
tacaatacttyaataaaatta

SEQ ID NO: 11717 - DNA, 21 bp, Homo sapiens
taaagtacagktccccaattt

SEQ ID NO: 11718 - DNA, 21 bp, Homo sapiens
ctgcatattcmcctgtttaac

SEQ ID NO: 11719 - DNA, 21 bp, Homo sapiens
actggccacckggtttggcct

SEQ ID NO: 11720 - DNA, 21 bp, Homo sapiens
gatttgtgtcrtctgtatgta

SEQ ID NO: 11721 - DNA, 21 bp, Homo sapiens
acatgtgtctygggtccttta

SEQ ID NO: 11722 - DNA, 21 bp, Homo sapiens
tttggatccaytgataggatc

SEQ ID NO: 11723 - DNA, 21 bp, Homo sapiens
gaagaagcatwcactttgttc

SEQ ID NO: 11724 - DNA, 21 bp, Homo sapiens
aattttaattrtggtacaata

SEQ ID NO: 11725 - DNA, 21 bp, Homo sapiens
gtcttccatgstgaataaaat

SEQ ID NO: 11726 - DNA, 21 bp, Homo sapiens
agaaatttgcygtcttgcaca

SEQ ID NO: 11727 - DNA, 21 bp, Homo sapiens
aacaccccaamagggaaatga

SEQ ID NO: 11728 - DNA, 21 bp, Homo sapiens
gctaaactccygggctgttgg

SEQ ID NO: 11729 - DNA, 21 bp, Homo sapiens
ctttctctcaracatcttgca

SEQ ID NO: 11730 - DNA, 21 bp, Homo sapiens
taaaccttttktgctacaaat

SEQ ID NO: 11731 - DNA, 21 bp, Homo sapiens
gattatcctcmaaggctgttt

SEQ ID NO: 11732 - DNA, 21 bp, Homo sapiens
agccatggttraaccaggaaa

SEQ ID NO: 11733 - DNA, 21 bp, Homo sapiens
ccactgctggyggctgagctg

SEQ ID NO: 11734 - DNA, 21 bp, Homo sapiens
agaaatctgcrttagtctgat

SEQ ID NO: 11735 - DNA, 21 bp, Homo sapiens
gataatgataktgccttcatt

SEQ ID NO: 11736 - DNA, 21 bp, Homo sapiens
gggtagttcckttatctcaag

SEQ ID NO: 11737 - DNA, 21 bp, Homo sapiens
ctttttatccygactctcggt

SEQ ID NO: 11738 - DNA, 21 bp, Homo sapiens
ttggagagggsacttgtgcac

SEQ ID NO: 11739 - DNA, 21 bp, Homo sapiens
ctgagggctgyctccaggcag

SEQ ID NO: 11740 - DNA, 21 bp, Homo sapiens
ctctaagatgsaggcatgggc

SEQ ID NO: 11741 - DNA, 21 bp, Homo sapiens
tgctatcttcscactcactat

SEQ ID NO: 11742 - DNA, 21 bp, Homo sapiens
gactgaatagrcctaacagga

SEQ ID NO: 11743 - DNA, 21 bp, Homo sapiens
ccaagatttgmatgtttgaaa

SEQ ID NO: 11744 - DNA, 21 bp, Homo sapiens
taaatattgamggaaattaaa

SEQ ID NO: 11745 - DNA, 21 bp, Homo sapiens
attcttcaagsaaatgggaac

SEQ ID NO: 11746 - DNA, 21 bp, Homo sapiens
tgacttaagayattttcaact

SEQ ID NO: 11747 - DNA, 21 bp, Homo sapiens
atattatgggwaacccagctg

SEQ ID NO: 11748 - DNA, 21 bp, Homo sapiens
gccttaattgyacatgaagca

SEQ ID NO: 11749 - DNA, 21 bp, Homo sapiens
ataattggaarggcaattgga

SEQ ID NO: 11750 - DNA, 21 bp, Homo sapiens
ttgccttggcrataatttgtc

SEQ ID NO: 11751 - DNA, 21 bp, Homo sapiens
gcaaaatcatygctgtaagaa

SEQ ID NO: 11752 - DNA, 21 bp, Homo sapiens
ggtatttagcrcagagttttt

SEQ ID NO: 11753 - DNA, 21 bp, Homo sapiens
ttccttaatayggctccattt

SEQ ID NO: 11754 - DNA, 21 bp, Homo sapiens
tgaaccctaaytttgtgatgt

SEQ ID NO: 11755 - DNA, 21 bp, Homo sapiens
cacagagacayagtgaataca

SEQ ID NO: 11756 - DNA, 21 bp, Homo sapiens
tctttttgctyccttaaaaag

SEQ ID NO: 11757 - DNA, 21 bp, Homo sapiens
tgggcacaccrcactcccgga

SEQ ID NO: 11758 - DNA, 21 bp, Homo sapiens
gctgtctttgytaggattagt

SEQ ID NO: 11759 - DNA, 21 bp, Homo sapiens
tttgttgtttwttaagctcct

SEQ ID NO: 11760 - DNA, 21 bp, Homo sapiens
tgcttagcctscatgacccat

SEQ ID NO: 11761 - DNA, 21 bp, Homo sapiens
ggtcactgttrgaatttctct

SEQ ID NO: 11762 - DNA, 21 bp, Homo sapiens
atttaggactrtttggcaatt

SEQ ID NO: 11763 - DNA, 21 bp, Homo sapiens
aaatgtttctrctttactggt

SEQ ID NO: 11764 - DNA, 21 bp, Homo sapiens
taaatattttyaaccaatctt

SEQ ID NO: 11765 - DNA, 21 bp, Homo sapiens
agtgctcagaragtatgttag

SEQ ID NO: 11766 - DNA, 21 bp, Homo sapiens
agaggagtggrgaatcttttc

SEQ ID NO: 11767 - DNA, 21 bp, Homo sapiens
aagaaatttaracttattcta

SEQ ID NO: 11768 - DNA, 21 bp, Homo sapiens
aactttgttamttttggccat

SEQ ID NO: 11769 - DNA, 21 bp, Homo sapiens
gaactggtcartattgtgaag

SEQ ID NO: 11770 - DNA, 21 bp, Homo sapiens
tcctcaccagwcaccaggtgc

SEQ ID NO: 11771 - DNA, 21 bp, Homo sapiens
atattccttgmccacttttcc

SEQ ID NO: 11772 - DNA, 21 bp, Homo sapiens
atacattatasagctcttctc

SEQ ID NO: 11773 - DNA, 21 bp, Homo sapiens
tgaagcaacgytaagcccaat

SEQ ID NO: 11774 - DNA, 21 bp, Homo sapiens
gatagtcagtytctagtttcc

SEQ ID NO: 11775 - DNA, 21 bp, Homo sapiens
tcatgaaattytacaactata

SEQ ID NO: 11776 - DNA, 21 bp, Homo sapiens
aaccacagaakcaggattgcc

SEQ ID NO: 11777 - DNA, 21 bp, Homo sapiens
aggaaggaagrtttgattaca

SEQ ID NO: 11778 - DNA, 21 bp, Homo sapiens
gtggcaatgtsacaaacctga

SEQ ID NO: 11779 - DNA, 21 bp, Homo sapiens
ggcactataawacataatctc

SEQ ID NO: 11780 - DNA, 21 bp, Homo sapiens
aacctgaaatkttaaaacaac

SEQ ID NO: 11781 - DNA, 21 bp, Homo sapiens
ttaacttggayttcctgatca

SEQ ID NO: 11782 - DNA, 21 bp, Homo sapiens
tctccctaacmacctagtgtt

SEQ ID NO: 11783 - DNA, 21 bp, Homo sapiens
aaacaacgtgkcattgacgtc

SEQ ID NO: 11784 - DNA, 21 bp, Homo sapiens
catccacagarttaaatttat

SEQ ID NO: 11785 - DNA, 21 bp, Homo sapiens
atttatatatmaaaataaaat

SEQ ID NO: 11786 - DNA, 21 bp, Homo sapiens
aatgttgaatyatgaagtcag

SEQ ID NO: 11787 - DNA, 21 bp, Homo sapiens
tgtgttaattsttgatattga

SEQ ID NO: 11788 - DNA, 21 bp, Homo sapiens
acagatacccrcatagcaata

SEQ ID NO: 11789 - DNA, 21 bp, Homo sapiens
ctgattccacratggccatct

SEQ ID NO: 11790 - DNA, 21 bp, Homo sapiens
ggaagagtctrtggatgtatt

SEQ ID NO: 11791 - DNA, 21 bp, Homo sapiens
acagccgcagrcctgagggct

SEQ ID NO: 11792 - DNA, 21 bp, Homo sapiens
atgtttgttayataattgcgt

SEQ ID NO: 11793 - DNA, 21 bp, Homo sapiens
ctggagccagrtggctcctag

SEQ ID NO: 11794 - DNA, 21 bp, Homo sapiens
aagccagctcrtagacagtat

SEQ ID NO: 11795 - DNA, 21 bp, Homo sapiens
taacctttgcrtgcagtctgc

SEQ ID NO: 11796 - DNA, 21 bp, Homo sapiens
ggtggacatakgattcactgg

SEQ ID NO: 11797 - DNA, 21 bp, Homo sapiens
atactttgagytgggggctga

SEQ ID NO: 11798 - DNA, 21 bp, Homo sapiens
gagatgtgtcrgaagaaggag

SEQ ID NO: 11799 - DNA, 21 bp, Homo sapiens
ggccgatacayactaagtcct

SEQ ID NO: 11800 - DNA, 21 bp, Homo sapiens
ctggtctatcytatttatttt

SEQ ID NO: 11801 - DNA, 21 bp, Homo sapiens
cggtccagatsgactggggga

SEQ ID NO: 11802 - DNA, 21 bp, Homo sapiens
tctcaactcgrcagcagacat

SEQ ID NO: 11803 - DNA, 21 bp, Homo sapiens
ttctttagagyatcctggcct

SEQ ID NO: 11804 - DNA, 21 bp, Homo sapiens
accaaaaattytataaactag

SEQ ID NO: 11805 - DNA, 21 bp, Homo sapiens
aaagcacacarcaacactggg

SEQ ID NO: 11806 - DNA, 21 bp, Homo sapiens
aaggcccctcycatcttctgc

SEQ ID NO: 11807 - DNA, 21 bp, Homo sapiens
aagtatgtaaracttaaacaa

SEQ ID NO: 11808 - DNA, 21 bp, Homo sapiens
cgaatggtgaygtagattgga

SEQ ID NO: 11809 - DNA, 21 bp, Homo sapiens
aaaattggaaratccatacta

SEQ ID NO: 11810 - DNA, 21 bp, Homo sapiens
agtgctctatwtatatccttc

SEQ ID NO: 11811 - DNA, 21 bp, Homo sapiens
gccaaaaccaygattatgact

SEQ ID NO: 11812 - DNA, 21 bp, Homo sapiens
ggtgagaattygtttccctga

SEQ ID NO: 11813 - DNA, 21 bp, Homo sapiens
tttggtaatcrttacattgaa

SEQ ID NO: 11814 - DNA, 21 bp, Homo sapiens
catttattccrcatgatgtct

SEQ ID NO: 11815 - DNA, 21 bp, Homo sapiens
gtaaaaactgwtgcaagtcaa

SEQ ID NO: 11816 - DNA, 21 bp, Homo sapiens
gcaggcaacaytattgtccct

SEQ ID NO: 11817 - DNA, 21 bp, Homo sapiens
aagataagtgsttggccaaag

SEQ ID NO: 11818 - DNA, 21 bp, Homo sapiens
caatttccatraaataccatg

SEQ ID NO: 11819 - DNA, 21 bp, Homo sapiens
gttaacacaamaaatgggaat

SEQ ID NO: 11820 - DNA, 21 bp, Homo sapiens
ctgcgtgtgtyctctgggaaa

SEQ ID NO: 11821 - DNA, 21 bp, Homo sapiens
aatggcaaaaktgttagaaaa

SEQ ID NO: 11822 - DNA, 21 bp, Homo sapiens
ctgtttaacartgaatgaagt

SEQ ID NO: 11823 - DNA, 21 bp, Homo sapiens
ttttattatayttcaataacc

SEQ ID NO: 11824 - DNA, 21 bp, Homo sapiens
ggacaatcctrgaatcagatg

SEQ ID NO: 11825 - DNA, 21 bp, Homo sapiens
cattgcacccrttttcttgat

SEQ ID NO: 11826 - DNA, 21 bp, Homo sapiens
atgagactaayggatacttcc

SEQ ID NO: 11827 - DNA, 21 bp, Homo sapiens
aacaaccgcayttttcgtgtc

SEQ ID NO: 11828 - DNA, 21 bp, Homo sapiens
ctgagagcttkgtgttcattg

SEQ ID NO: 11829 - DNA, 21 bp, Homo sapiens
tcagaagttayagtctcaaga

SEQ ID NO: 11830 - DNA, 21 bp, Homo sapiens
acccaaaacamtcccatttga

SEQ ID NO: 11831 - DNA, 21 bp, Homo sapiens
tcattcagaayttccaacaaa

SEQ ID NO: 11832 - DNA, 21 bp, Homo sapiens
gccatctgtcrcaggggctag

SEQ ID NO: 11833 - DNA, 21 bp, Homo sapiens
agtttcaaggmaccataaaat

SEQ ID NO: 11834 - DNA, 21 bp, Homo sapiens
cttaaatgacrtttagagcca

SEQ ID NO: 11835 - DNA, 21 bp, Homo sapiens
attacttttcygactctgtaa

SEQ ID NO: 11836 - DNA, 21 bp, Homo sapiens
cttttagttgrcatattacac

SEQ ID NO: 11837 - DNA, 21 bp, Homo sapiens
aaatggatttrtgatatagga

SEQ ID NO: 11838 - DNA, 21 bp, Homo sapiens
ccatgcacttsccccaagaga

SEQ ID NO: 11839 - DNA, 21 bp, Homo sapiens
attgcagaatrgggccagact

SEQ ID NO: 11840 - DNA, 21 bp, Homo sapiens
aagaaagtctkttgcaaaaag

SEQ ID NO: 11841 - DNA, 21 bp, Homo sapiens
tcagactcagwgggtttcata

SEQ ID NO: 11842 - DNA, 21 bp, Homo sapiens
tagtgtggtgycttgttagag

SEQ ID NO: 11843 - DNA, 21 bp, Homo sapiens
aggagtttacrgaaacaaatt

SEQ ID NO: 11844 - DNA, 21 bp, Homo sapiens
gtgactgtctytgccaaacca

SEQ ID NO: 11845 - DNA, 21 bp, Homo sapiens
tgggttgacartcagcatgtt

SEQ ID NO: 11846 - DNA, 21 bp, Homo sapiens
attagtgtgartaacagaatc

SEQ ID NO: 11847 - DNA, 21 bp, Homo sapiens
tggccaagttrtatcttcaca

SEQ ID NO: 11848 - DNA, 21 bp, Homo sapiens
atcttgtgttyattacttact

SEQ ID NO: 11849 - DNA, 21 bp, Homo sapiens
tagacttagcygaagagagga

SEQ ID NO: 11850 - DNA, 21 bp, Homo sapiens
tctgctgctcrtaagcttgag

SEQ ID NO: 11851 - DNA, 21 bp, Homo sapiens
agctggaggastgatactatc

SEQ ID NO: 11852 - DNA, 21 bp, Homo sapiens
tgcagactcamtattgtaaac

SEQ ID NO: 11853 - DNA, 21 bp, Homo sapiens
tggatgcttaratcattgact

SEQ ID NO: 11854 - DNA, 21 bp, Homo sapiens
aacataaaagratcattcaaa

SEQ ID NO: 11855 - DNA, 21 bp, Homo sapiens
taagttccctyacacgggcat

SEQ ID NO: 11856 - DNA, 21 bp, Homo sapiens
aaaatggcacrtggaaaaact

SEQ ID NO: 11857 - DNA, 21 bp, Homo sapiens
gtccaaatagyagagtgagat

SEQ ID NO: 11858 - DNA, 21 bp, Homo sapiens
cttcagggccrattagtatca

SEQ ID NO: 11859 - DNA, 21 bp, Homo sapiens
aggtgtgtacyattcccagag

SEQ ID NO: 11860 - DNA, 21 bp, Homo sapiens
cacaccccctygtcagccaca

SEQ ID NO: 11861 - DNA, 21 bp, Homo sapiens
caaaatttatrctctttccag

SEQ ID NO: 11862 - DNA, 21 bp, Homo sapiens
gttttaatatyctcattctta

SEQ ID NO: 11863 - DNA, 21 bp, Homo sapiens
attttattcargatgaggata

SEQ ID NO: 11864 - DNA, 21 bp, Homo sapiens
tatagcacatktagattgaga

SEQ ID NO: 11865 - DNA, 21 bp, Homo sapiens
ttttcatttartttccttgta

SEQ ID NO: 11866 - DNA, 21 bp, Homo sapiens
tgtgggctctrtgacaaaaat

SEQ ID NO: 11867 - DNA, 21 bp, Homo sapiens
aacagttttgmccagcataat

SEQ ID NO: 11868 - DNA, 21 bp, Homo sapiens
ttaattttatrtctatacgta

SEQ ID NO: 11869 - DNA, 21 bp, Homo sapiens
aacgctcagtrtctagtgctt

SEQ ID NO: 11870 - DNA, 21 bp, Homo sapiens
atgccatccayccattaatgg

SEQ ID NO: 11871 - DNA, 21 bp, Homo sapiens
ctgctaaccarttaagatggg

SEQ ID NO: 11872 - DNA, 21 bp, Homo sapiens
tgaggtctttkcacttgctct

SEQ ID NO: 11873 - DNA, 21 bp, Homo sapiens
ttgccttctgktcttcagtgc

SEQ ID NO: 11874 - DNA, 21 bp, Homo sapiens
taaatgaattrgcgaaaggct

SEQ ID NO: 11875 - DNA, 21 bp, Homo sapiens
agaatccatakaactctacag

SEQ ID NO: 11876 - DNA, 21 bp, Homo sapiens
tttccctccartccagatccc

SEQ ID NO: 11877 - DNA, 21 bp, Homo sapiens
gaacagccacrgcaccaatgg

SEQ ID NO: 11878 - DNA, 21 bp, Homo sapiens
ttagcagtggscacacggtat

SEQ ID NO: 11879 - DNA, 21 bp, Homo sapiens
tggctgggacratggcaccta

SEQ ID NO: 11880 - DNA, 21 bp, Homo sapiens
gtcaagctcgytcttccacat

SEQ ID NO: 11881 - DNA, 21 bp, Homo sapiens
aagttttcctrgactggtgac

SEQ ID NO: 11882 - DNA, 21 bp, Homo sapiens
ggtttttgtcwattaatgaag

SEQ ID NO: 11883 - DNA, 21 bp, Homo sapiens
attgtaggcgygtgtttttta

SEQ ID NO: 11884 - DNA, 21 bp, Homo sapiens
ttacaatcacrtgccaccatg

SEQ ID NO: 11885 - DNA, 21 bp, Homo sapiens
tttacctcaartcgtacaggg

SEQ ID NO: 11886 - DNA, 21 bp, Homo sapiens
gatgaagtctyggaaccaagc

SEQ ID NO: 11887 - DNA, 21 bp, Homo sapiens
tccccgccacygacttcccca

SEQ ID NO: 11888 - DNA, 21 bp, Homo sapiens
cccaaataagytacttgcatt

SEQ ID NO: 11889 - DNA, 21 bp, Homo sapiens
gttatctaatrcacagtccat

SEQ ID NO: 11890 - DNA, 21 bp, Homo sapiens
ttgaacaatgmgaccttattt

SEQ ID NO: 11891 - DNA, 21 bp, Homo sapiens
cgcagcaggarggttgaaacc

SEQ ID NO: 11892 - DNA, 21 bp, Homo sapiens
gatgaaaaaasacacatttta

SEQ ID NO: 11893 - DNA, 21 bp, Homo sapiens
accaaaggctrcaaagacacc

SEQ ID NO: 11894 - DNA, 21 bp, Homo sapiens
gaacagttacyaccaagctgt

SEQ ID NO: 11895 - DNA, 21 bp, Homo sapiens
cccgggtgacygaagacagcc

SEQ ID NO: 11896 - DNA, 21 bp, Homo sapiens
gggggctgggraagttttcac

SEQ ID NO: 11897 - DNA, 21 bp, Homo sapiens
gttattagaasgttggaacat

SEQ ID NO: 11898 - DNA, 21 bp, Homo sapiens
actggtgacaycctcctaaac

SEQ ID NO: 11899 - DNA, 21 bp, Homo sapiens
tgagggtacargaagccatgc

SEQ ID NO: 11900 - DNA, 21 bp, Homo sapiens
gccgcacactyattctccaaa

SEQ ID NO: 11901 - DNA, 21 bp, Homo sapiens
ctccttccttycgcaaagaag

SEQ ID NO: 11902 - DNA, 21 bp, Homo sapiens
gagaatttgcrggtgcatttt

SEQ ID NO: 11903 - DNA, 21 bp, Homo sapiens
cctgccagagrccaaggctgg

SEQ ID NO: 11904 - DNA, 21 bp, Homo sapiens
ttatcatcacrtaggaataat

SEQ ID NO: 11905 - DNA, 21 bp, Homo sapiens
agcggatcacktgagcccagg

SEQ ID NO: 11906 - DNA, 21 bp, Homo sapiens
gcatgtcagarcctccttaca

SEQ ID NO: 11907 - DNA, 21 bp, Homo sapiens
gggaccagttkttttttcatt

SEQ ID NO: 11908 - DNA, 21 bp, Homo sapiens
ctaatttgccrtctggaattg

SEQ ID NO: 11909 - DNA, 21 bp, Homo sapiens
ggctgggaacrtggtctttgc

SEQ ID NO: 11910 - DNA, 21 bp, Homo sapiens
ggtgggggtcrtgtggaatga

SEQ ID NO: 11911 - DNA, 21 bp, Homo sapiens
tatcctttggkcattggttcc

SEQ ID NO: 11912 - DNA, 21 bp, Homo sapiens
aaagtttatgkagtcaggaaa

SEQ ID NO: 11913 - DNA, 21 bp, Homo sapiens
cgttggagaargtggcttagt

SEQ ID NO: 11914 - DNA, 21 bp, Homo sapiens
tagcatctacrcacctaaagc

SEQ ID NO: 11915 - DNA, 21 bp, Homo sapiens
gcccagctccsgggtggatgc

SEQ ID NO: 11916 - DNA, 21 bp, Homo sapiens
aggcctggctytgccctcgag

SEQ ID NO: 11917 - DNA, 21 bp, Homo sapiens
tacggtggctsacacctataa

SEQ ID NO: 11918 - DNA, 21 bp, Homo sapiens
gcacctagatmttggacttcc

SEQ ID NO: 11919 - DNA, 21 bp, Homo sapiens
catcatccacyacggcccagg

SEQ ID NO: 11920 - DNA, 21 bp, Homo sapiens
ccatgacaggyccataagctg

SEQ ID NO: 11921 - DNA, 21 bp, Homo sapiens
gaccctgtgcyggctgaatcg

SEQ ID NO: 11922 - DNA, 21 bp, Homo sapiens
ggaagaaaaayatacagtgaa

SEQ ID NO: 11923 - DNA, 21 bp, Homo sapiens
tatccataccygtgtgaatct

SEQ ID NO: 11924 - DNA, 21 bp, Homo sapiens
tatccaatgtygctgtgtccc

SEQ ID NO: 11925 - DNA, 21 bp, Homo sapiens
actttagtatygtgagtgagc

SEQ ID NO: 11926 - DNA, 21 bp, Homo sapiens
ccagtgctgayggtgtctctg

SEQ ID NO: 11927 - DNA, 21 bp, Homo sapiens
acaagttggckcaaaatctgc

SEQ ID NO: 11928 - DNA, 21 bp, Homo sapiens
gcccagagcgkggaggccgtg

SEQ ID NO: 11929 - DNA, 21 bp, Homo sapiens
ggcccagagarggttggtgac

SEQ ID NO: 11930 - DNA, 21 bp, Homo sapiens
cggcaggagaygcagtgaagc

SEQ ID NO: 11931 - DNA, 21 bp, Homo sapiens
ccatttaacasacaagagact

SEQ ID NO: 11932 - DNA, 21 bp, Homo sapiens
attgctcaggytcgcagggct

SEQ ID NO: 11933 - DNA, 21 bp, Homo sapiens
tgctccctgcrgtgtgcacat

SEQ ID NO: 11934 - DNA, 21 bp, Homo sapiens
taatcacaggyggaactagga

SEQ ID NO: 11935 - DNA, 21 bp, Homo sapiens
agagtaaaacsctagttggac

SEQ ID NO: 11936 - DNA, 21 bp, Homo sapiens
gattctggaartgtgtatcta

SEQ ID NO: 11937 - DNA, 21 bp, Homo sapiens
ctggtgctgasgctgggaggg

SEQ ID NO: 11938 - DNA, 21 bp, Homo sapiens
ctccgtggcgyaggcttccca

SEQ ID NO: 11939 - DNA, 21 bp, Homo sapiens
tcaacagacasagtgagatgg

SEQ ID NO: 11940 - DNA, 21 bp, Homo sapiens
gccccggttcscatctacccc

SEQ ID NO: 11941 - DNA, 21 bp, Homo sapiens
cctctcaatcwggggatagtt

SEQ ID NO: 11942 - DNA, 21 bp, Homo sapiens
aaactcagatrtggcttcagg

SEQ ID NO: 11943 - DNA, 21 bp, Homo sapiens
cgcagcgaccktgtcagagtc

SEQ ID NO: 11944 - DNA, 21 bp, Homo sapiens
tgcttggcccrtgcttaagaa

SEQ ID NO: 11945 - DNA, 21 bp, Homo sapiens
ccttgcctggyggggcaaccc

SEQ ID NO: 11946 - DNA, 21 bp, Homo sapiens
ggaagtctgaygcactctcag

SEQ ID NO: 11947 - DNA, 21 bp, Homo sapiens
tctggatttcratgtgaaatc

SEQ ID NO: 11948 - DNA, 21 bp, Homo sapiens
gagagggctgragctgagtgc

SEQ ID NO: 11949 - DNA, 21 bp, Homo sapiens
ttgctaatcarcataaacagg

SEQ ID NO: 11950 - DNA, 21 bp, Homo sapiens
ccacggtgccrtggatgccgt

SEQ ID NO: 11951 - DNA, 21 bp, Homo sapiens
accattttgtycttcatgcta

SEQ ID NO: 11952 - DNA, 21 bp, Homo sapiens
gtcttgcctgkttcactatga

SEQ ID NO: 11953 - DNA, 21 bp, Homo sapiens
tttgcagtttmtttgtgtata

SEQ ID NO: 11954 - DNA, 21 bp, Homo sapiens
gagaaggcacragctcaggca

SEQ ID NO: 11955 - DNA, 21 bp, Homo sapiens
acgccttcatstaatttcttc

SEQ ID NO: 11956 - DNA, 21 bp, Homo sapiens
tgcccagacakcagatatcat

SEQ ID NO: 11957 - DNA, 21 bp, Homo sapiens
cagaagactcygtcatcaggc

SEQ ID NO: 11958 - DNA, 21 bp, Homo sapiens
tctgatagccsctgtctgcag

SEQ ID NO: 11959 - DNA, 21 bp, Homo sapiens
ttatggtgtcraatctctgct

SEQ ID NO: 11960 - DNA, 21 bp, Homo sapiens
tctcgggcccrtgtggagggt

SEQ ID NO: 11961 - DNA, 21 bp, Homo sapiens
actctgcccaktggttctgga

SEQ ID NO: 11962 - DNA, 21 bp, Homo sapiens
cccgatggaarcatttcacaa

SEQ ID NO: 11963 - DNA, 21 bp, Homo sapiens
tttatctctcrattccactag

SEQ ID NO: 11964 - DNA, 21 bp, Homo sapiens
ccactttccamccgaatcctg

SEQ ID NO: 11965 - DNA, 21 bp, Homo sapiens
ccagggactascaagagtaaa

SEQ ID NO: 11966 - DNA, 21 bp, Homo sapiens
ggagatgccargaatagagaa

SEQ ID NO: 11967 - DNA, 21 bp, Homo sapiens
ccatctcccamatcatggtcc

SEQ ID NO: 11968 - DNA, 21 bp, Homo sapiens
ggaatgtgcaytgccacactt

SEQ ID NO: 11969 - DNA, 21 bp, Homo sapiens
tgggggaggcrcagagggggt

SEQ ID NO: 11970 - DNA, 21 bp, Homo sapiens
gatttggggamcttaattcct

SEQ ID NO: 11971 - DNA, 21 bp, Homo sapiens
gtgctgagtarctgaggagct

SEQ ID NO: 11972 - DNA, 21 bp, Homo sapiens
acttctggacmccggggactt

SEQ ID NO: 11973 - DNA, 21 bp, Homo sapiens
gcatggtgttrataaagagta

SEQ ID NO: 11974 - DNA, 21 bp, Homo sapiens
gccttttttgwccttggtgat

SEQ ID NO: 11975 - DNA, 21 bp, Homo sapiens
tcaggaagccrcgttccgtcc

SEQ ID NO: 11976 - DNA, 21 bp, Homo sapiens
gatagaggagrtaggatctgt

SEQ ID NO: 11977 - DNA, 21 bp, Homo sapiens
gactcacgtgsaaagttggga

SEQ ID NO: 11978 - DNA, 21 bp, Homo sapiens
tagtggcttayaatgagaata

SEQ ID NO: 11979 - DNA, 21 bp, Homo sapiens
gagtttataayggccttgttt

SEQ ID NO: 11980 - DNA, 21 bp, Homo sapiens
cctagtgttcygtgctccaga

SEQ ID NO: 11981 - DNA, 21 bp, Homo sapiens
cttttcttgtytccagacaga

SEQ ID NO: 11982 - DNA, 21 bp, Homo sapiens
tcttccttcasatgtgcttgt

SEQ ID NO: 11983 - DNA, 21 bp, Homo sapiens
cagtgttctcrtacattttat

SEQ ID NO: 11984 - DNA, 21 bp, Homo sapiens
agtgccacacstaacagttga

SEQ ID NO: 11985 - DNA, 21 bp, Homo sapiens
gtaacttctcrtctaaaatcc

SEQ ID NO: 11986 - DNA, 21 bp, Homo sapiens
ggtctctgggytcttggccca

SEQ ID NO: 11987 - DNA, 21 bp, Homo sapiens
ggaattcagcmcagactgccc

SEQ ID NO: 11988 - DNA, 21 bp, Homo sapiens
tacattcccayggtgccggac

SEQ ID NO: 11989 - DNA, 21 bp, Homo sapiens
acctcccgctkcatgacccta

SEQ ID NO: 11990 - DNA, 21 bp, Homo sapiens
caggggctgtsaggttctgta

SEQ ID NO: 11991 - DNA, 21 bp, Homo sapiens
ctccagatatrggcctgttgc

SEQ ID NO: 11992 - DNA, 21 bp, Homo sapiens
gagtccgttgscctcacctgg

SEQ ID NO: 11993 - DNA, 21 bp, Homo sapiens
tgagcgtggcktgtcttaggg

SEQ ID NO: 11994 - DNA, 21 bp, Homo sapiens
cactgcctgcractttctact

SEQ ID NO: 11995 - DNA, 21 bp, Homo sapiens
ggagaggaggsctcaaaaggg

SEQ ID NO: 11996 - DNA, 21 bp, Homo sapiens
tgcgcggcatrtttcatgact

SEQ ID NO: 11997 - DNA, 21 bp, Homo sapiens
cgcctatcacrcacaaagaat

SEQ ID NO: 11998 - DNA, 21 bp, Homo sapiens
gcacagtgagwgccttccagc

SEQ ID NO: 11999 - DNA, 21 bp, Homo sapiens
ggctaatgagygcggagctcc

SEQ ID NO: 12000 - DNA, 21 bp, Homo sapiens
acacttgaaayaagggatgtt

SEQ ID NO: 12001 - DNA, 21 bp, Homo sapiens
tagggaagagstggtaagaag

SEQ ID NO: 12002 - DNA, 21 bp, Homo sapiens
cgggatttgtkctaatattca

SEQ ID NO: 12003 - DNA, 21 bp, Homo sapiens
gaggctgagcrgttaagacca

SEQ ID NO: 12004 - DNA, 21 bp, Homo sapiens
gtggctggttyttggcccaac

SEQ ID NO: 12005 - DNA, 21 bp, Homo sapiens
aaaacaaaatwaacccgactc

SEQ ID NO: 12006 - DNA, 21 bp, Homo sapiens
agggtcactcrcgactctaca

SEQ ID NO: 12007 - DNA, 21 bp, Homo sapiens
agatcctgccyggttggtgct

SEQ ID NO: 12008 - DNA, 21 bp, Homo sapiens
tcagtggcctyggggctatca

SEQ ID NO: 12009 - DNA, 21 bp, Homo sapiens
ctgtcactcayctgaagtcca

SEQ ID NO: 12010 - DNA, 21 bp, Homo sapiens
agaggccatckgggtgcaggg

SEQ ID NO: 12011 - DNA, 21 bp, Homo sapiens
ggtgaggctcytctgttccct

SEQ ID NO: 12012 - DNA, 21 bp, Homo sapiens
acatgggcaaycctggcttcg

SEQ ID NO: 12013 - DNA, 21 bp, Homo sapiens
gacctccaccrtgagaacacc

SEQ ID NO: 12014 - DNA, 21 bp, Homo sapiens
atcttgggacmaagaaggttt

SEQ ID NO: 12015 - DNA, 21 bp, Homo sapiens
gatgccagtgyatcctacctg

SEQ ID NO: 12016 - DNA, 21 bp, Homo sapiens
gtagctgaggygagcattgca

SEQ ID NO: 12017 - DNA, 21 bp, Homo sapiens
tgctgggctgyctgtgtcaat

SEQ ID NO: 12018 - DNA, 21 bp, Homo sapiens
cctgtgtcaaygcaccttgag

SEQ ID NO: 12019 - DNA, 21 bp, Homo sapiens
gtgcaggacasctccatccac

SEQ ID NO: 12020 - DNA, 21 bp, Homo sapiens
taggaagcagsagtcctggga

SEQ ID NO: 12021 - DNA, 21 bp, Homo sapiens
catgggatgawtatgagcaaa

SEQ ID NO: 12022 - DNA, 21 bp, Homo sapiens
tgcaaattagytgagtatgtg

SEQ ID NO: 12023 - DNA, 21 bp, Homo sapiens
aaccacatagygttgagtgca

SEQ ID NO: 12024 - DNA, 21 bp, Homo sapiens
actcacctgcmtctgagccac

SEQ ID NO: 12025 - DNA, 21 bp, Homo sapiens
agactcccttytgctccccaa

SEQ ID NO: 12026 - DNA, 21 bp, Homo sapiens
actcccttctrctccccaaaa

SEQ ID NO: 12027 - DNA, 21 bp, Homo sapiens
tcgagcagttmtccactgtga

SEQ ID NO: 12028 - DNA, 21 bp, Homo sapiens
actgtgaaggrcgtcaatctg

SEQ ID NO: 12029 - DNA, 21 bp, Homo sapiens
actcagccagygataatataa

SEQ ID NO: 12030 - DNA, 21 bp, Homo sapiens
gccactgtcgmacccacctct

SEQ ID NO: 12031 - DNA, 21 bp, Homo sapiens
gagctctggcratactaccac

SEQ ID NO: 12032 - DNA, 21 bp, Homo sapiens
tctcaaacccrgcagatggtt

SEQ ID NO: 12033 - DNA, 21 bp, Homo sapiens
gagcagagagrccttagaaag

SEQ ID NO: 12034 - DNA, 21 bp, Homo sapiens
attgactcccygtgagtgttc

SEQ ID NO: 12035 - DNA, 21 bp, Homo sapiens
aaagacactcrggatggaaca

SEQ ID NO: 12036 - DNA, 21 bp, Homo sapiens
tgctggacgcyatcgtcctgg

SEQ ID NO: 12037 - DNA, 21 bp, Homo sapiens
aggccacacayggaggaagct

SEQ ID NO: 12038 - DNA, 21 bp, Homo sapiens
aaaccagggargaaggatagg

SEQ ID NO: 12039 - DNA, 21 bp, Homo sapiens
cagaagtagasaactcctcgc

SEQ ID NO: 12040 - DNA, 21 bp, Homo sapiens
ataaagtttgytcctagccga

SEQ ID NO: 12041 - DNA, 21 bp, Homo sapiens
aacggttaaasaagtcagcac

SEQ ID NO: 12042 - DNA, 21 bp, Homo sapiens
gagagcccaayaccaagttct

SEQ ID NO: 12043 - DNA, 21 bp, Homo sapiens
gaacccccctyctaccccctg

SEQ ID NO: 12044 - DNA, 21 bp, Homo sapiens
ccacctctgcrgtcattaaac

SEQ ID NO: 12045 - DNA, 21 bp, Homo sapiens
actgaatgcarcccgagagcc

SEQ ID NO: 12046 - DNA, 21 bp, Homo sapiens
gggtcagcatragtaatattg

SEQ ID NO: 12047 - DNA, 21 bp, Homo sapiens
gaagtacctcraaacctcatc

SEQ ID NO: 12048 - DNA, 21 bp, Homo sapiens
ccacatacttkcaaagtcatc

SEQ ID NO: 12049 - DNA, 21 bp, Homo sapiens
caccagggtcyggaggaagcc

SEQ ID NO: 12050 - DNA, 21 bp, Homo sapiens
ctcagaggggwgttctgcaat

SEQ ID NO: 12051 - DNA, 21 bp, Homo sapiens
tccaaagggartcaatcaggt

SEQ ID NO: 12052 - DNA, 21 bp, Homo sapiens
atactaacatrtgcaaagaac

SEQ ID NO: 12053 - DNA, 21 bp, Homo sapiens
ggtgggggatragaaacgcca

SEQ ID NO: 12054 - DNA, 21 bp, Homo sapiens
aagtaagcacmccccacaccc

SEQ ID NO: 12055 - DNA, 21 bp, Homo sapiens
agaaaggaagytcctgtccct

SEQ ID NO: 12056 - DNA, 21 bp, Homo sapiens
aaactgcattrctaaaaaggg

SEQ ID NO: 12057 - DNA, 21 bp, Homo sapiens
tgccagaggaraattttgttt

SEQ ID NO: 12058 - DNA, 21 bp, Homo sapiens
agaaccatctygccacttaca

SEQ ID NO: 12059 - DNA, 21 bp, Homo sapiens
ggagttttccrtctattctta

SEQ ID NO: 12060 - DNA, 21 bp, Homo sapiens
ctgtgatgagrccttgctgga

SEQ ID NO: 12061 - DNA, 21 bp, Homo sapiens
gggcattttcytgttagcccc

SEQ ID NO: 12062 - DNA, 21 bp, Homo sapiens
cacaaggctgrggcccttctt

SEQ ID NO: 12063 - DNA, 21 bp, Homo sapiens
tatcaggcttrtggcccccca

SEQ ID NO: 12064 - DNA, 21 bp, Homo sapiens
agaggaaggargttcaccatg

SEQ ID NO: 12065 - DNA, 21 bp, Homo sapiens
gctgcccattyggaagctctc

SEQ ID NO: 12066 - DNA, 21 bp, Homo sapiens
tcccccaccayctgcttctca

SEQ ID NO: 12067 - DNA, 21 bp, Homo sapiens
aaatcaggctkttttttaaac

SEQ ID NO: 12068 - DNA, 21 bp, Homo sapiens
tctgactcacracactgagaa

SEQ ID NO: 12069 - DNA, 21 bp, Homo sapiens
cagtggcaagytcctgaacac

SEQ ID NO: 12070 - DNA, 21 bp, Homo sapiens
aacttaagaakaaagcaaaac

SEQ ID NO: 12071 - DNA, 21 bp, Homo sapiens
agctgccctcmccctcctact

SEQ ID NO: 12072 - DNA, 21 bp, Homo sapiens
gcccagcatcyggggactcac

SEQ ID NO: 12073 - DNA, 21 bp, Homo sapiens
ggggaacctgkgtttgaaagc

SEQ ID NO: 12074 - DNA, 21 bp, Homo sapiens
agacccagcgsggggagttct

SEQ ID NO: 12075 - DNA, 21 bp, Homo sapiens
ccttttatcarggttatttac

SEQ ID NO: 12076 - DNA, 21 bp, Homo sapiens
tcctgccccaracacgcatag

SEQ ID NO: 12077 - DNA, 21 bp, Homo sapiens
tgttctaggasatccactagg

SEQ ID NO: 12078 - DNA, 21 bp, Homo sapiens
tactattttaratactgttct

SEQ ID NO: 12079 - DNA, 21 bp, Homo sapiens
catgcttgaamtaactttaga

SEQ ID NO: 12080 - DNA, 21 bp, Homo sapiens
aaagccataamtcagattttg

SEQ ID NO: 12081 - DNA, 21 bp, Homo sapiens
ttgggtttctrtgggtgattc

SEQ ID NO: 12082 - DNA, 21 bp, Homo sapiens
ggcaatggtcrtatttcctgg

SEQ ID NO: 12083 - DNA, 21 bp, Homo sapiens
taagcctatawatagctgcga

SEQ ID NO: 12084 - DNA, 21 bp, Homo sapiens
agcaccccacmaattctgatc

SEQ ID NO: 12085 - DNA, 21 bp, Homo sapiens
taagatgattwaatgtgtagt

SEQ ID NO: 12086 - DNA, 21 bp, Homo sapiens
attggccccaytgactatagt

SEQ ID NO: 12087 - DNA, 21 bp, Homo sapiens
acttaagagtyatttggtact

SEQ ID NO: 12088 - DNA, 21 bp, Homo sapiens
acacagcaatraattgctttg

SEQ ID NO: 12089 - DNA, 21 bp, Homo sapiens
gtatatgattyttttcagagt

SEQ ID NO: 12090 - DNA, 21 bp, Homo sapiens
attctattttkggatccaagt

SEQ ID NO: 12091 - DNA, 21 bp, Homo sapiens
gctaatgaccmaaattctctc

SEQ ID NO: 12092 - DNA, 21 bp, Homo sapiens
aatctttggaytttagtatgc

SEQ ID NO: 12093 - DNA, 21 bp, Homo sapiens
agttggactastcactggata

SEQ ID NO: 12094 - DNA, 21 bp, Homo sapiens
ttgcttttacrgattctcttg

SEQ ID NO: 12095 - DNA, 21 bp, Homo sapiens
gccagagctgyagctcaccag

SEQ ID NO: 12096 - DNA, 21 bp, Homo sapiens
taacaataatyagaaaatatc

SEQ ID NO: 12097 - DNA, 21 bp, Homo sapiens
gacaaaaattwtctcatgaac

SEQ ID NO: 12098 - DNA, 21 bp, Homo sapiens
tcatcctggamctctgtgtca

SEQ ID NO: 12099 - DNA, 21 bp, Homo sapiens
atttcccactrtctgtttgaa

SEQ ID NO: 12100 - DNA, 21 bp, Homo sapiens
atatatgatayaatgatggca

SEQ ID NO: 12101 - DNA, 21 bp, Homo sapiens
attttatagaytgaaaatctt

SEQ ID NO: 12102 - DNA, 21 bp, Homo sapiens
gcaacttcacyttgtgctttt

SEQ ID NO: 12103 - DNA, 21 bp, Homo sapiens
aattagtctcytttggttatt

SEQ ID NO: 12104 - DNA, 21 bp, Homo sapiens
gaacttccaarctgtccccca

SEQ ID NO: 12105 - DNA, 21 bp, Homo sapiens
ccagtcccaasgctatcatag

SEQ ID NO: 12106 - DNA, 21 bp, Homo sapiens
actgacattcygttagaaact

SEQ ID NO: 12107 - DNA, 21 bp, Homo sapiens
agttgagccayagtgaaatat

SEQ ID NO: 12108 - DNA, 21 bp, Homo sapiens
ccttatacaaygactgaaggg

SEQ ID NO: 12109 - DNA, 21 bp, Homo sapiens
agttgtctggkcaatgatgac

SEQ ID NO: 12110 - DNA, 21 bp, Homo sapiens
ctcttaaaaartatatataaa

SEQ ID NO: 12111 - DNA, 21 bp, Homo sapiens
tggttggaatrtaagttagga

SEQ ID NO: 12112 - DNA, 21 bp, Homo sapiens
gaccatatcckgagtgtagaa

SEQ ID NO: 12113 - DNA, 21 bp, Homo sapiens
tgaggtgtccrggtatttggc

SEQ ID NO: 12114 - DNA, 21 bp, Homo sapiens
cagtttgtgaytgatactgta

SEQ ID NO: 12115 - DNA, 21 bp, Homo sapiens
atgtcggctgygtctaatgtc

SEQ ID NO: 12116 - DNA, 21 bp, Homo sapiens
tcacattagaygaatctaggg

SEQ ID NO: 12117 - DNA, 21 bp, Homo sapiens
catatactgawtttttttttc

SEQ ID NO: 12118 - DNA, 21 bp, Homo sapiens
ctcactatatycttatacttc

SEQ ID NO: 12119 - DNA, 21 bp, Homo sapiens
ttttggagtakattcttaaat

SEQ ID NO: 12120 - DNA, 21 bp, Homo sapiens
aagcaagggarcaagtgatac

SEQ ID NO: 12121 - DNA, 21 bp, Homo sapiens
aatttcctgaycttcaatcct

SEQ ID NO: 12122 - DNA, 21 bp, Homo sapiens
tattttgcggratattaaaac

SEQ ID NO: 12123 - DNA, 21 bp, Homo sapiens
aaattagcacrtatgactgct

SEQ ID NO: 12124 - DNA, 21 bp, Homo sapiens
ctctttttttwataagttgat

SEQ ID NO: 12125 - DNA, 21 bp, Homo sapiens
ctttttacagygtatgaacag

SEQ ID NO: 12126 - DNA, 21 bp, Homo sapiens
tcaacagagakggaattgtca

SEQ ID NO: 12127 - DNA, 21 bp, Homo sapiens
taatttgaaakggggtttttc

SEQ ID NO: 12128 - DNA, 21 bp, Homo sapiens
tcaatttcatyttataagagt

SEQ ID NO: 12129 - DNA, 21 bp, Homo sapiens
tctagaaggcrtagtatgctg

SEQ ID NO: 12130 - DNA, 21 bp, Homo sapiens
aaaccgatttsagagaatatt

SEQ ID NO: 12131 - DNA, 21 bp, Homo sapiens
tgaatcaaagrtagtttctga

SEQ ID NO: 12132 - DNA, 21 bp, Homo sapiens
cagctctgatratgaggggtg

SEQ ID NO: 12133 - DNA, 21 bp, Homo sapiens
catttgagggyttagaacttc

SEQ ID NO: 12134 - DNA, 21 bp, Homo sapiens
tttataagccrtatgagtttg

SEQ ID NO: 12135 - DNA, 21 bp, Homo sapiens
tcccctggctrtatgttattt

SEQ ID NO: 12136 - DNA, 21 bp, Homo sapiens
tatctgttttmcttcctattt

SEQ ID NO: 12137 - DNA, 21 bp, Homo sapiens
tcaactcttgwtcctcatcta

SEQ ID NO: 12138 - DNA, 21 bp, Homo sapiens
taggatatcartgggtgtgta

SEQ ID NO: 12139 - DNA, 21 bp, Homo sapiens
tatgcgtaacyatctctacca

SEQ ID NO: 12140 - DNA, 21 bp, Homo sapiens
gtaggacgagmttctaaccca

SEQ ID NO: 12141 - DNA, 21 bp, Homo sapiens
tggaactacargattcttcat

SEQ ID NO: 12142 - DNA, 21 bp, Homo sapiens
actgagaaagraggcgaatta

SEQ ID NO: 12143 - DNA, 21 bp, Homo sapiens
gtatttaattkttaaagtgtt

SEQ ID NO: 12144 - DNA, 21 bp, Homo sapiens
tattctgtcaytgtctgcctt

SEQ ID NO: 12145 - DNA, 21 bp, Homo sapiens
acctatttttrcttttgtttc

SEQ ID NO: 12146 - DNA, 21 bp, Homo sapiens
catatctttgkatccttgcgg

SEQ ID NO: 12147 - DNA, 21 bp, Homo sapiens
gttgacagttytcacaaaaca

SEQ ID NO: 12148 - DNA, 21 bp, Homo sapiens
gtagacttctyaatttttcta

SEQ ID NO: 12149 - DNA, 21 bp, Homo sapiens
acatgactacrtacataaagg

SEQ ID NO: 12150 - DNA, 21 bp, Homo sapiens
gacgattgcartagaatgaga

SEQ ID NO: 12151 - DNA, 21 bp, Homo sapiens
agatggatgtrcagaaggctt

SEQ ID NO: 12152 - DNA, 21 bp, Homo sapiens
tagatttattygcctgataag

SEQ ID NO: 12153 - DNA, 21 bp, Homo sapiens
ttttatagtaygcccacctca

SEQ ID NO: 12154 - DNA, 21 bp, Homo sapiens
acagaatgtarggacaatcac

SEQ ID NO: 12155 - DNA, 21 bp, Homo sapiens
actacttccarataaattgaa

SEQ ID NO: 12156 - DNA, 21 bp, Homo sapiens
cacactccagmccctggaaat

SEQ ID NO: 12157 - DNA, 21 bp, Homo sapiens
tcaaagcaaamtgcagcaatt

SEQ ID NO: 12158 - DNA, 21 bp, Homo sapiens
ttggccaaaargagtggtcta

SEQ ID NO: 12159 - DNA, 21 bp, Homo sapiens
ataaaccctgrgtctgggggc

SEQ ID NO: 12160 - DNA, 21 bp, Homo sapiens
gataaaaccckgaaacttgct

SEQ ID NO: 12161 - DNA, 21 bp, Homo sapiens
gattccagaayagcttagtta

SEQ ID NO: 12162 - DNA, 21 bp, Homo sapiens
gtatacacaawgcatagatac

SEQ ID NO: 12163 - DNA, 21 bp, Homo sapiens
tcatggtccaygatatcaaaa

SEQ ID NO: 12164 - DNA, 21 bp, Homo sapiens
atctttggtgwttttaaaaag

SEQ ID NO: 12165 - DNA, 21 bp, Homo sapiens
aagacacaagstacagcagga

SEQ ID NO: 12166 - DNA, 21 bp, Homo sapiens
gataggctgayatctttaaag

SEQ ID NO: 12167 - DNA, 21 bp, Homo sapiens
tctctctgggsctgataattt

SEQ ID NO: 12168 - DNA, 21 bp, Homo sapiens
catgcactcaytgcatgccta

SEQ ID NO: 12169 - DNA, 21 bp, Homo sapiens
aactggattgygatccttttg

SEQ ID NO: 12170 - DNA, 21 bp, Homo sapiens
aagcctctgargaatacacac

SEQ ID NO: 12171 - DNA, 21 bp, Homo sapiens
aactagacctstttctttaac

SEQ ID NO: 12172 - DNA, 21 bp, Homo sapiens
agcatccattragtagaaact

SEQ ID NO: 12173 - DNA, 21 bp, Homo sapiens
agaacacaaayaagagcagga

SEQ ID NO: 12174 - DNA, 21 bp, Homo sapiens
gtggttaagtsgggccaggtg

SEQ ID NO: 12175 - DNA, 21 bp, Homo sapiens
acttgtatccyaaagcttcat

SEQ ID NO: 12176 - DNA, 21 bp, Homo sapiens
caaatagctarcatcaagagt

SEQ ID NO: 12177 - DNA, 21 bp, Homo sapiens
agttgtttatrtcatttgcat

SEQ ID NO: 12178 - DNA, 21 bp, Homo sapiens
gaaaaaaaaawgttggggggg

SEQ ID NO: 12179 - DNA, 21 bp, Homo sapiens
caatttgtaasgtttgtttag

SEQ ID NO: 12180 - DNA, 21 bp, Homo sapiens
accagaaaacycttggatatc

SEQ ID NO: 12181 - DNA, 21 bp, Homo sapiens
tttaaaagttrcagatagaat

SEQ ID NO: 12182 - DNA, 21 bp, Homo sapiens
caatcactgayggagggaggg

SEQ ID NO: 12183 - DNA, 21 bp, Homo sapiens
ccgctgtgtcrtaccataccg

SEQ ID NO: 12184 - DNA, 21 bp, Homo sapiens
gaatgatcatkctgtctagtt

SEQ ID NO: 12185 - DNA, 21 bp, Homo sapiens
agagagagagwtccctgaaag

SEQ ID NO: 12186 - DNA, 21 bp, Homo sapiens
ttgggtaaggwtcattgctaa

SEQ ID NO: 12187 - DNA, 21 bp, Homo sapiens
ccttgagagakaatggattga

SEQ ID NO: 12188 - DNA, 21 bp, Homo sapiens
aagctattggyatcttcctcc

SEQ ID NO: 12189 - DNA, 21 bp, Homo sapiens
ctcatagaaasccatgtgatt

SEQ ID NO: 12190 - DNA, 21 bp, Homo sapiens
gcaagggaatrgtgagatgag

SEQ ID NO: 12191 - DNA, 21 bp, Homo sapiens
gctgacttcartgtatcaggc

SEQ ID NO: 12192 - DNA, 21 bp, Homo sapiens
agacctttacsggttagcata

SEQ ID NO: 12193 - DNA, 21 bp, Homo sapiens
gggaaatgagrgcctgaggct

SEQ ID NO: 12194 - DNA, 21 bp, Homo sapiens
cacaatgctgrgagacattca

SEQ ID NO: 12195 - DNA, 21 bp, Homo sapiens
agtattaagawaaaatgcatc

SEQ ID NO: 12196 - DNA, 21 bp, Homo sapiens
aaataactttytgatgttttt

SEQ ID NO: 12197 - DNA, 21 bp, Homo sapiens
cccaacttgakgtaaactttg

SEQ ID NO: 12198 - DNA, 21 bp, Homo sapiens
tactattttgytgaagagaaa

SEQ ID NO: 12199 - DNA, 21 bp, Homo sapiens
gaaacaatctyctcaaactac

SEQ ID NO: 12200 - DNA, 21 bp, Homo sapiens
atgaacatcamgtaggtcagt

SEQ ID NO: 12201 - DNA, 21 bp, Homo sapiens
caagaagagastcattgcttc

SEQ ID NO: 12202 - DNA, 21 bp, Homo sapiens
aaattaaacakaaaaatttat

SEQ ID NO: 12203 - DNA, 21 bp, Homo sapiens
atatttgttcyaaataatttt

SEQ ID NO: 12204 - DNA, 21 bp, Homo sapiens
ttctgataatrgagtgaccct

SEQ ID NO: 12205 - DNA, 21 bp, Homo sapiens
tctctggcttygtgtcatgac

SEQ ID NO: 12206 - DNA, 21 bp, Homo sapiens
ttagaaactgyctgtttacca

SEQ ID NO: 12207 - DNA, 21 bp, Homo sapiens
tcaatgaatgyaactaatgac

SEQ ID NO: 12208 - DNA, 21 bp, Homo sapiens
aatgctcagasaatagcagat

SEQ ID NO: 12209 - DNA, 21 bp, Homo sapiens
gaaagtgggamacaactaaaa

SEQ ID NO: 12210 - DNA, 21 bp, Homo sapiens
agttttgcaaraccctgagcc

SEQ ID NO: 12211 - DNA, 21 bp, Homo sapiens
aaggacacttrcagtttcata

SEQ ID NO: 12212 - DNA, 21 bp, Homo sapiens
tttatttggtrggggagtgat

SEQ ID NO: 12213 - DNA, 21 bp, Homo sapiens
gtaaacatttmaaccagttca

SEQ ID NO: 12214 - DNA, 21 bp, Homo sapiens
agtaatttcaytcctatattg

SEQ ID NO: 12215 - DNA, 21 bp, Homo sapiens
tgaatagccayaaaatgggaa

SEQ ID NO: 12216 - DNA, 21 bp, Homo sapiens
acatcacaacyaatctgtatg

SEQ ID NO: 12217 - DNA, 21 bp, Homo sapiens
ctccataggtrgggacaacac

SEQ ID NO: 12218 - DNA, 21 bp, Homo sapiens
actttgctgcyatctgctggg

SEQ ID NO: 12219 - DNA, 21 bp, Homo sapiens
gtcaccaacakgtcattgcag

SEQ ID NO: 12220 - DNA, 21 bp, Homo sapiens
cattcttctgrgacgtgggac

SEQ ID NO: 12221 - DNA, 21 bp, Homo sapiens
aaggcctgaamgatcaaaggc

SEQ ID NO: 12222 - DNA, 21 bp, Homo sapiens
cttagattctkatctaatgtt

SEQ ID NO: 12223 - DNA, 21 bp, Homo sapiens
ccacgcattckcagtataatt

SEQ ID NO: 12224 - DNA, 21 bp, Homo sapiens
tgtaggaaacygatactaaat

SEQ ID NO: 12225 - DNA, 21 bp, Homo sapiens
acatgaagaayttttatgagg

SEQ ID NO: 12226 - DNA, 21 bp, Homo sapiens
tcttctgagtrggatttattc

SEQ ID NO: 12227 - DNA, 21 bp, Homo sapiens
aattcactgaytactcctcag

SEQ ID NO: 12228 - DNA, 21 bp, Homo sapiens
tcccagagtgrcacaattggc

SEQ ID NO: 12229 - DNA, 21 bp, Homo sapiens
aaaaaaaaaawtacaatgtat

SEQ ID NO: 12230 - DNA, 21 bp, Homo sapiens
aactggaatargagaatataa

SEQ ID NO: 12231 - DNA, 21 bp, Homo sapiens
acaaatgaatmttaggttcag

SEQ ID NO: 12232 - DNA, 21 bp, Homo sapiens
caagaaaaacrgatggctgtt

SEQ ID NO: 12233 - DNA, 21 bp, Homo sapiens
cagatgtctcratataggaat

SEQ ID NO: 12234 - DNA, 21 bp, Homo sapiens
tgtgtttctayaattctgtcc

SEQ ID NO: 12235 - DNA, 21 bp, Homo sapiens
ctttaggctastctttgcatg

SEQ ID NO: 12236 - DNA, 21 bp, Homo sapiens
tgaagtggctmcactcccata

SEQ ID NO: 12237 - DNA, 21 bp, Homo sapiens
gattataaacrgtaatttatg

SEQ ID NO: 12238 - DNA, 21 bp, Homo sapiens
aactatatagyattctgtcac

SEQ ID NO: 12239 - DNA, 21 bp, Homo sapiens
ggccttgtcaytttgaagatt

SEQ ID NO: 12240 - DNA, 21 bp, Homo sapiens
ctagtggcttrtcatttctag

SEQ ID NO: 12241 - DNA, 21 bp, Homo sapiens
ctgtggcaaakgaagtcctct

SEQ ID NO: 12242 - DNA, 21 bp, Homo sapiens
aacaggttttstttctttgtt

SEQ ID NO: 12243 - DNA, 21 bp, Homo sapiens
tcatgggactrtgtccatctt

SEQ ID NO: 12244 - DNA, 21 bp, Homo sapiens
tgctggctctrgcaaagacaa

SEQ ID NO: 12245 - DNA, 21 bp, Homo sapiens
acctgcacaakcagtccacag

SEQ ID NO: 12246 - DNA, 21 bp, Homo sapiens
ccattatcctwttacaacaac

SEQ ID NO: 12247 - DNA, 21 bp, Homo sapiens
ctatggggacmaaagtgcttt

SEQ ID NO: 12248 - DNA, 21 bp, Homo sapiens
atcaaaattartctcatcatt

SEQ ID NO: 12249 - DNA, 21 bp, Homo sapiens
cttgcaatacyctatggaaag

SEQ ID NO: 12250 - DNA, 21 bp, Homo sapiens
ttctaactgamcagagtggaa

SEQ ID NO: 12251 - DNA, 21 bp, Homo sapiens
tagacctaacmagacacatga

SEQ ID NO: 12252 - DNA, 21 bp, Homo sapiens
gaaacttccawtgcagagctt

SEQ ID NO: 12253 - DNA, 21 bp, Homo sapiens
gacacctgagytaatgcaacg

SEQ ID NO: 12254 - DNA, 21 bp, Homo sapiens
ccagcaaagartattttaccc

SEQ ID NO: 12255 - DNA, 21 bp, Homo sapiens
gaagaaaagamaattggattt

SEQ ID NO: 12256 - DNA, 21 bp, Homo sapiens
ctgcactgcaygagtgccagc

SEQ ID NO: 12257 - DNA, 21 bp, Homo sapiens
ggggctcccaytcccattaca

SEQ ID NO: 12258 - DNA, 21 bp, Homo sapiens
gaatcagtagkcttatgcttt

SEQ ID NO: 12259 - DNA, 21 bp, Homo sapiens
ttctgtcttayatgactcaga

SEQ ID NO: 12260 - DNA, 21 bp, Homo sapiens
ttccaatgagrccatcataat

SEQ ID NO: 12261 - DNA, 21 bp, Homo sapiens
tatgggattawataacactct

SEQ ID NO: 12262 - DNA, 21 bp, Homo sapiens
ttctttcttaygattatcatt

SEQ ID NO: 12263 - DNA, 21 bp, Homo sapiens
agtgtatgaartggattagtt

SEQ ID NO: 12264 - DNA, 21 bp, Homo sapiens
cctcaattgtsaacaggagtt

SEQ ID NO: 12265 - DNA, 21 bp, Homo sapiens
tcaatctaacrgtcctcagaa

SEQ ID NO: 12266 - DNA, 21 bp, Homo sapiens
gagtgtaaatrttacctacct

SEQ ID NO: 12267 - DNA, 21 bp, Homo sapiens
taaaaaacccrggaaccaaat

SEQ ID NO: 12268 - DNA, 21 bp, Homo sapiens
atcagggcgtrgtaggcagct

SEQ ID NO: 12269 - DNA, 21 bp, Homo sapiens
gaaaatgtttygagctactta

SEQ ID NO: 12270 - DNA, 21 bp, Homo sapiens
tgggattttgkcactgtgctg

SEQ ID NO: 12271 - DNA, 21 bp, Homo sapiens
tctaaacaggraactctgtct

SEQ ID NO: 12272 - DNA, 21 bp, Homo sapiens
aaaaaaaaaamcccccaaaag

SEQ ID NO: 12273 - DNA, 21 bp, Homo sapiens
gtatctaaagraaggagggta

SEQ ID NO: 12274 - DNA, 21 bp, Homo sapiens
tttcctctctsgtctctgtgt

SEQ ID NO: 12275 - DNA, 21 bp, Homo sapiens
aaatgctcagrtgaaaaacca

SEQ ID NO: 12276 - DNA, 21 bp, Homo sapiens
gctagaccacycttccatagc

SEQ ID NO: 12277 - DNA, 21 bp, Homo sapiens
acctgtatgcygtgtgaaaga

SEQ ID NO: 12278 - DNA, 21 bp, Homo sapiens
aaggcattttrtatcaataaa

SEQ ID NO: 12279 - DNA, 21 bp, Homo sapiens
aatattttcarataaatcttt

SEQ ID NO: 12280 - DNA, 21 bp, Homo sapiens
taacacagacrtagacaatta

SEQ ID NO: 12281 - DNA, 21 bp, Homo sapiens
cctccaacatrtaagacgcat

SEQ ID NO: 12282 - DNA, 21 bp, Homo sapiens
cttggggtggrgatggcgggg

SEQ ID NO: 12283 - DNA, 21 bp, Homo sapiens
aactgggaccrtacaaatcac

SEQ ID NO: 12284 - DNA, 21 bp, Homo sapiens
ggcagcagagstgtggcacct

SEQ ID NO: 12285 - DNA, 21 bp, Homo sapiens
tcttgtagacwgtccagatcc

SEQ ID NO: 12286 - DNA, 21 bp, Homo sapiens
atccaaagacycatgcttgat

SEQ ID NO: 12287 - DNA, 21 bp, Homo sapiens
cgaaggcataygcttgtcata

SEQ ID NO: 12288 - DNA, 21 bp, Homo sapiens
aataatataargaaaattctg

SEQ ID NO: 12289 - DNA, 21 bp, Homo sapiens
tctaaaactaytatctaagga

SEQ ID NO: 12290 - DNA, 21 bp, Homo sapiens
cacttttatcrggaacacagc

SEQ ID NO: 12291 - DNA, 21 bp, Homo sapiens
tttggtaagtygcgtgactct

SEQ ID NO: 12292 - DNA, 21 bp, Homo sapiens
tcagtttcagyattgtagaac

SEQ ID NO: 12293 - DNA, 21 bp, Homo sapiens
gttaattctayttttccccct

SEQ ID NO: 12294 - DNA, 21 bp, Homo sapiens
gaaggaaagcmtccctggcaa

SEQ ID NO: 12295 - DNA, 21 bp, Homo sapiens
acaatgcagaygaagccccaa

SEQ ID NO: 12296 - DNA, 21 bp, Homo sapiens
gtatttatctmacaagtaatc

SEQ ID NO: 12297 - DNA, 21 bp, Homo sapiens
ttagtaggaaragcagcatgc

SEQ ID NO: 12298 - DNA, 21 bp, Homo sapiens
catattttcayttctcctgga

SEQ ID NO: 12299 - DNA, 21 bp, Homo sapiens
aagatcatatstcacttaggc

SEQ ID NO: 12300 - DNA, 21 bp, Homo sapiens
agtgagatgamtgtgtggggg

SEQ ID NO: 12301 - DNA, 21 bp, Homo sapiens
agagctttaakaaacagagaa

SEQ ID NO: 12302 - DNA, 21 bp, Homo sapiens
catctgggtgrtcaataaact

SEQ ID NO: 12303 - DNA, 21 bp, Homo sapiens
caaaaccagcraattttacaa

SEQ ID NO: 12304 - DNA, 21 bp, Homo sapiens
tatcaaaagcyatcagttacc

SEQ ID NO: 12305 - DNA, 21 bp, Homo sapiens
tggctgcagtktggaggatga

SEQ ID NO: 12306 - DNA, 21 bp, Homo sapiens
caataaacctrtaggagccta

SEQ ID NO: 12307 - DNA, 21 bp, Homo sapiens
tggaatgagtyttagtcgaaa

SEQ ID NO: 12308 - DNA, 21 bp, Homo sapiens
aaaaacagtcrtcacttacag

SEQ ID NO: 12309 - DNA, 21 bp, Homo sapiens
tggcaactggyaagtggctag

SEQ ID NO: 12310 - DNA, 21 bp, Homo sapiens
atggagagtcytctgggcctg

SEQ ID NO: 12311 - DNA, 21 bp, Homo sapiens
tccttttcacyttgttaaaac

SEQ ID NO: 12312 - DNA, 21 bp, Homo sapiens
cccattatgcyagaggagaaa

SEQ ID NO: 12313 - DNA, 21 bp, Homo sapiens
gccagtgatgyttatttggaa

SEQ ID NO: 12314 - DNA, 21 bp, Homo sapiens
ggcaagaatgytttacctgaa

SEQ ID NO: 12315 - DNA, 21 bp, Homo sapiens
aaaagggtcgwttcacaagag

SEQ ID NO: 12316 - DNA, 21 bp, Homo sapiens
ttgaaaaactrataaaattgg

SEQ ID NO: 12317 - DNA, 21 bp, Homo sapiens
tgataaggaaytcaaatttct

SEQ ID NO: 12318 - DNA, 21 bp, Homo sapiens
tcaggaaaacmgttactgtgc

SEQ ID NO: 12319 - DNA, 21 bp, Homo sapiens
cattatcctaygttgtttatg

SEQ ID NO: 12320 - DNA, 21 bp, Homo sapiens
attatttatargtgcaacaat

SEQ ID NO: 12321 - DNA, 21 bp, Homo sapiens
cagtgctaacrgcccatcttt

SEQ ID NO: 12322 - DNA, 21 bp, Homo sapiens
actgagaatcyggtggaaaga

SEQ ID NO: 12323 - DNA, 21 bp, Homo sapiens
ctcatagtacmtagaaaacag

SEQ ID NO: 12324 - DNA, 21 bp, Homo sapiens
gacctttgcaytttaagttat

SEQ ID NO: 12325 - DNA, 21 bp, Homo sapiens
ggaaagggccktattaattgc

SEQ ID NO: 12326 - DNA, 21 bp, Homo sapiens
ttctgatgatyccagcaggga

SEQ ID NO: 12327 - DNA, 21 bp, Homo sapiens
caggctataargtactacact

SEQ ID NO: 12328 - DNA, 21 bp, Homo sapiens
ttccctctacstatttatgaa

SEQ ID NO: 12329 - DNA, 21 bp, Homo sapiens
aggtgtcagtkgtaaaagtaa

SEQ ID NO: 12330 - DNA, 21 bp, Homo sapiens
accttctcccygattatccct

SEQ ID NO: 12331 - DNA, 21 bp, Homo sapiens
ttagaataggrgttaccaaat

SEQ ID NO: 12332 - DNA, 21 bp, Homo sapiens
gtgcttaccarttaaagtcca

SEQ ID NO: 12333 - DNA, 21 bp, Homo sapiens
cttggtgttgyataaaataat

SEQ ID NO: 12334 - DNA, 21 bp, Homo sapiens
atcctatcatrttcttaacct

SEQ ID NO: 12335 - DNA, 21 bp, Homo sapiens
gtgaaattaargacatcaata

SEQ ID NO: 12336 - DNA, 21 bp, Homo sapiens
taagaatctamcaatgtctgt

SEQ ID NO: 12337 - DNA, 21 bp, Homo sapiens
gatttctctaytaggggtatt

SEQ ID NO: 12338 - DNA, 21 bp, Homo sapiens
tgcttacttcwttttccttta

SEQ ID NO: 12339 - DNA, 21 bp, Homo sapiens
ccattgatacrttcttgccta

SEQ ID NO: 12340 - DNA, 21 bp, Homo sapiens
gataatttgawctttagacta

SEQ ID NO: 12341 - DNA, 21 bp, Homo sapiens
ctggataaacrtatcactttt

SEQ ID NO: 12342 - DNA, 21 bp, Homo sapiens
ttgatcagtaratggtacagc

SEQ ID NO: 12343 - DNA, 21 bp, Homo sapiens
ttgataaagcyctacatctga

SEQ ID NO: 12344 - DNA, 21 bp, Homo sapiens
tgcttaaacaytgtgagttct

SEQ ID NO: 12345 - DNA, 21 bp, Homo sapiens
caagattataygtaatccagt

SEQ ID NO: 12346 - DNA, 21 bp, Homo sapiens
tgaagtgtcartagtttgaat

SEQ ID NO: 12347 - DNA, 21 bp, Homo sapiens
tcaaatagaargcctgtatag

SEQ ID NO: 12348 - DNA, 21 bp, Homo sapiens
agtgaggatcygatgtgatgg

SEQ ID NO: 12349 - DNA, 21 bp, Homo sapiens
gaatcagacayttgtaatgcc

SEQ ID NO: 12350 - DNA, 21 bp, Homo sapiens
gcacaattaaygctggatttg

SEQ ID NO: 12351 - DNA, 21 bp, Homo sapiens
aggaagaaaastgggtaggag

SEQ ID NO: 12352 - DNA, 21 bp, Homo sapiens
aattttaactwttccacaatg

SEQ ID NO: 12353 - DNA, 21 bp, Homo sapiens
aaacttctccraaatgtattt

SEQ ID NO: 12354 - DNA, 21 bp, Homo sapiens
atgagtcagtwctcattttct

SEQ ID NO: 12355 - DNA, 21 bp, Homo sapiens
cccaacaaatkcctcatcttc

SEQ ID NO: 12356 - DNA, 21 bp, Homo sapiens
acaaagtatcygactcgatct

SEQ ID NO: 12357 - DNA, 21 bp, Homo sapiens
caacttttctmacataagcaa

SEQ ID NO: 12358 - DNA, 21 bp, Homo sapiens
agaaatcaggwagttatgtgt

SEQ ID NO: 12359 - DNA, 21 bp, Homo sapiens
gactaagatcrcaatacttgt

SEQ ID NO: 12360 - DNA, 21 bp, Homo sapiens
ggtgcttattyagtgattaag

SEQ ID NO: 12361 - DNA, 21 bp, Homo sapiens
gttgtataatwttaagaaaca

SEQ ID NO: 12362 - DNA, 21 bp, Homo sapiens
gctgttgctgwtgcctggtgt

SEQ ID NO: 12363 - DNA, 21 bp, Homo sapiens
gtgaaggaatytaaaataatc

SEQ ID NO: 12364 - DNA, 21 bp, Homo sapiens
aggaatctgcyggatgatgca

SEQ ID NO: 12365 - DNA, 21 bp, Homo sapiens
aaacctatcaytgatatccta

SEQ ID NO: 12366 - DNA, 21 bp, Homo sapiens
caactctactmaaattttaaa

SEQ ID NO: 12367 - DNA, 21 bp, Homo sapiens
cagtctcttcwtccacacagg

SEQ ID NO: 12368 - DNA, 21 bp, Homo sapiens
ccttcatccgygctgacctgc

SEQ ID NO: 12369 - DNA, 21 bp, Homo sapiens
gggcaatatcyctggtcgacc

SEQ ID NO: 12370 - DNA, 21 bp, Homo sapiens
agtacatctarctgccattag

SEQ ID NO: 12371 - DNA, 21 bp, Homo sapiens
aaatccagcakccataagatt

SEQ ID NO: 12372 - DNA, 21 bp, Homo sapiens
aggggcaagtmatattacaaa

SEQ ID NO: 12373 - DNA, 21 bp, Homo sapiens
gtgtaaaatakgccaacaaaa

SEQ ID NO: 12374 - DNA, 21 bp, Homo sapiens
tgaagacaaamatacagacat

SEQ ID NO: 12375 - DNA, 21 bp, Homo sapiens
aatatagacamaaacatcatt

SEQ ID NO: 12376 - DNA, 21 bp, Homo sapiens
cactgaagaaratatacagac

SEQ ID NO: 12377 - DNA, 21 bp, Homo sapiens
cattactaacrgcatacccat

SEQ ID NO: 12378 - DNA, 21 bp, Homo sapiens
aatctttgtgytgtattcaag

SEQ ID NO: 12379 - DNA, 21 bp, Homo sapiens
aataatggggygccggttaat

SEQ ID NO: 12380 - DNA, 21 bp, Homo sapiens
agataaaatayatataagatt

SEQ ID NO: 12381 - DNA, 21 bp, Homo sapiens
aagttttatgygttcataaat

SEQ ID NO: 12382 - DNA, 21 bp, Homo sapiens
tgttaaaacgytccggaattc

SEQ ID NO: 12383 - DNA, 21 bp, Homo sapiens
aaacatgcgargaaactgaaa

SEQ ID NO: 12384 - DNA, 21 bp, Homo sapiens
gacccctaaasagtcaggctc

SEQ ID NO: 12385 - DNA, 21 bp, Homo sapiens
aaaacaatcawggacaaggga

SEQ ID NO: 12386 - DNA, 21 bp, Homo sapiens
aaggacacttrtaacagcccc

SEQ ID NO: 12387 - DNA, 21 bp, Homo sapiens
ctacacctgcrttacaggaat

SEQ ID NO: 12388 - DNA, 21 bp, Homo sapiens
aggttaataaytgattatttt

SEQ ID NO: 12389 - DNA, 21 bp, Homo sapiens
cagcaacttcrataaacacat

SEQ ID NO: 12390 - DNA, 21 bp, Homo sapiens
aattattacarttttttacat

SEQ ID NO: 12391 - DNA, 21 bp, Homo sapiens
ccaatattacrgattctgtat

SEQ ID NO: 12392 - DNA, 21 bp, Homo sapiens
actactgaagwctgaagcctt

SEQ ID NO: 12393 - DNA, 21 bp, Homo sapiens
ttaggaggggraggtggaagg

SEQ ID NO: 12394 - DNA, 21 bp, Homo sapiens
ccatgcacccmgcacatttat

SEQ ID NO: 12395 - DNA, 21 bp, Homo sapiens
cactttagaayagaggaaaga

SEQ ID NO: 12396 - DNA, 21 bp, Homo sapiens
taattaatacyctgtggcact

SEQ ID NO: 12397 - DNA, 21 bp, Homo sapiens
cttaaaaatcrtaaggtactt

SEQ ID NO: 12398 - DNA, 21 bp, Homo sapiens
agttagcagtyaatatagaca

SEQ ID NO: 12399 - DNA, 21 bp, Homo sapiens
cagacttctgrggcaggaaat

SEQ ID NO: 12400 - DNA, 21 bp, Homo sapiens
ttgtttgaccrtatcttccag

SEQ ID NO: 12401 - DNA, 21 bp, Homo sapiens
agacaagaatraacactttca

SEQ ID NO: 12402 - DNA, 21 bp, Homo sapiens
ctaaagctatyatagaggtca

SEQ ID NO: 12403 - DNA, 21 bp, Homo sapiens
gcctagcccaytacaatatct

SEQ ID NO: 12404 - DNA, 21 bp, Homo sapiens
ataatagtggrggacttcaac

SEQ ID NO: 12405 - DNA, 21 bp, Homo sapiens
cttatgcactrttgatgggac

SEQ ID NO: 12406 - DNA, 21 bp, Homo sapiens
ttttatgaaayattttactga

SEQ ID NO: 12407 - DNA, 21 bp, Homo sapiens
tgtgtttgatrtaaaataagg

SEQ ID NO: 12408 - DNA, 21 bp, Homo sapiens
cagacttaccmttcaaatttg

SEQ ID NO: 12409 - DNA, 21 bp, Homo sapiens
gcaaccaaggratgcttgatc

SEQ ID NO: 12410 - DNA, 21 bp, Homo sapiens
caaatgtgacrgacccaaaaa

SEQ ID NO: 12411 - DNA, 21 bp, Homo sapiens
atacattctgwgtttgctgat

SEQ ID NO: 12412 - DNA, 21 bp, Homo sapiens
gtcactgatargtgcccaaaa

SEQ ID NO: 12413 - DNA, 21 bp, Homo sapiens
ctcatccctcmcctcatggag

SEQ ID NO: 12414 - DNA, 21 bp, Homo sapiens
tgttattgccrcaggcagatt

SEQ ID NO: 12415 - DNA, 21 bp, Homo sapiens
gggaaaaaaamcttttccaaa

SEQ ID NO: 12416 - DNA, 21 bp, Homo sapiens
tttctagcctyttaaatttat

SEQ ID NO: 12417 - DNA, 21 bp, Homo sapiens
cccaacaataygttacataca

SEQ ID NO: 12418 - DNA, 21 bp, Homo sapiens
ttgaataaatrtggaaaattt

SEQ ID NO: 12419 - DNA, 21 bp, Homo sapiens
atttctattcyatagcctatt

SEQ ID NO: 12420 - DNA, 21 bp, Homo sapiens
aacagcatttyggaagtcatg

SEQ ID NO: 12421 - DNA, 21 bp, Homo sapiens
tctttgtccartcactagctg

SEQ ID NO: 12422 - DNA, 21 bp, Homo sapiens
aaatatgggcrtttattaaaa

SEQ ID NO: 12423 - DNA, 21 bp, Homo sapiens
taaaactctgycaggagccaa

SEQ ID NO: 12424 - DNA, 21 bp, Homo sapiens
ggataaggctyttattttaga

SEQ ID NO: 12425 - DNA, 21 bp, Homo sapiens
ctctgttacawctatcttctt

SEQ ID NO: 12426 - DNA, 21 bp, Homo sapiens
ttccccttggraacattttcc

SEQ ID NO: 12427 - DNA, 21 bp, Homo sapiens
aacagattccmacaaaatgaa

SEQ ID NO: 12428 - DNA, 21 bp, Homo sapiens
ggtcccttctwgaaagttggc

SEQ ID NO: 12429 - DNA, 21 bp, Homo sapiens
ttggaaaaatwtaaaattaga

SEQ ID NO: 12430 - DNA, 21 bp, Homo sapiens
tccctttccayaccctcaacg

SEQ ID NO: 12431 - DNA, 21 bp, Homo sapiens
tcattctctcrggaaaaaaaa

SEQ ID NO: 12432 - DNA, 21 bp, Homo sapiens
ttgtaaagcayctcttaagtg

SEQ ID NO: 12433 - DNA, 21 bp, Homo sapiens
ctgaaaaaacrtatgttccaa

SEQ ID NO: 12434 - DNA, 21 bp, Homo sapiens
atgcacgcaaytgacatcatc

SEQ ID NO: 12435 - DNA, 21 bp, Homo sapiens
gccacagaaarcactaaacaa

SEQ ID NO: 12436 - DNA, 21 bp, Homo sapiens
ccttttatctkcaagagactt

SEQ ID NO: 12437 - DNA, 21 bp, Homo sapiens
tttacccccayacttgatact

SEQ ID NO: 12438 - DNA, 21 bp, Homo sapiens
gcatcagcacrtatgtgggca

SEQ ID NO: 12439 - DNA, 21 bp, Homo sapiens
tccacccacarggctccatcc

SEQ ID NO: 12440 - DNA, 21 bp, Homo sapiens
tttcagcttgrttgttttaca

SEQ ID NO: 12441 - DNA, 21 bp, Homo sapiens
tgtctgacaayttattctgtt

SEQ ID NO: 12442 - DNA, 21 bp, Homo sapiens
gcatccacagwataaattcct

SEQ ID NO: 12443 - DNA, 21 bp, Homo sapiens
ttcaagtggcrgcaggtttcc

SEQ ID NO: 12444 - DNA, 21 bp, Homo sapiens
gtttgcccgaraaatggtcat

SEQ ID NO: 12445 - DNA, 21 bp, Homo sapiens
gtcctgcacaygttattttgt

SEQ ID NO: 12446 - DNA, 21 bp, Homo sapiens
gtgtcttgccrgtaaggactg

SEQ ID NO: 12447 - DNA, 21 bp, Homo sapiens
gaatctactcrtggtgaacca

SEQ ID NO: 12448 - DNA, 21 bp, Homo sapiens
aacacccaggygtggacccta

SEQ ID NO: 12449 - DNA, 21 bp, Homo sapiens
agcccaggccycctcatttca

SEQ ID NO: 12450 - DNA, 21 bp, Homo sapiens
ccctaaggtgwctgctgactc

SEQ ID NO: 12451 - DNA, 21 bp, Homo sapiens
tctccagggaycttcatgaaa

SEQ ID NO: 12452 - DNA, 21 bp, Homo sapiens
tttgtagtttragcaatttca

SEQ ID NO: 12453 - DNA, 21 bp, Homo sapiens
tcggtgcctcrgccatggaat

SEQ ID NO: 12454 - DNA, 21 bp, Homo sapiens
atttttgttcygtggtccctg

SEQ ID NO: 12455 - DNA, 21 bp, Homo sapiens
tgtctcccagragtcacctta

SEQ ID NO: 12456 - DNA, 21 bp, Homo sapiens
cattcccagtscctgaacttg

SEQ ID NO: 12457 - DNA, 21 bp, Homo sapiens
attggtttagmaagttccaga

SEQ ID NO: 12458 - DNA, 21 bp, Homo sapiens
tcacagtaacmagaggagcca

SEQ ID NO: 12459 - DNA, 21 bp, Homo sapiens
cagttaaacarggtgccacag

SEQ ID NO: 12460 - DNA, 21 bp, Homo sapiens
tcagtatccamcctttggacg

SEQ ID NO: 12461 - DNA, 21 bp, Homo sapiens
tgtaaatttarcctggagctg

SEQ ID NO: 12462 - DNA, 21 bp, Homo sapiens
aaacaacgccrgtggcctctg

SEQ ID NO: 12463 - DNA, 21 bp, Homo sapiens
cagtgtgtttmtgtactggtt

SEQ ID NO: 12464 - DNA, 21 bp, Homo sapiens
ctttcccagtsgccaacaagc

SEQ ID NO: 12465 - DNA, 21 bp, Homo sapiens
cgcttgatgcygaaaaggcaa

SEQ ID NO: 12466 - DNA, 21 bp, Homo sapiens
accagagtgcyggaccatcac

SEQ ID NO: 12467 - DNA, 21 bp, Homo sapiens
cctgagcatgygattcagact

SEQ ID NO: 12468 - DNA, 21 bp, Homo sapiens
tccatgtgacrtcagagtccg

SEQ ID NO: 12469 - DNA, 21 bp, Homo sapiens
cagtccaagcrtgagaaagct

SEQ ID NO: 12470 - DNA, 21 bp, Homo sapiens
cttaaagccamacacatatat

SEQ ID NO: 12471 - DNA, 21 bp, Homo sapiens
agttaatgaamaagggtatca

SEQ ID NO: 12472 - DNA, 21 bp, Homo sapiens
cggggtttggsgggaggggga

SEQ ID NO: 12473 - DNA, 21 bp, Homo sapiens
gggatggaggmaataaactca

SEQ ID NO: 12474 - DNA, 21 bp, Homo sapiens
atcagcggtcrtcactgcagg

SEQ ID NO: 12475 - DNA, 21 bp, Homo sapiens
gctcccacccwtggggccctt

SEQ ID NO: 12476 - DNA, 21 bp, Homo sapiens
actttgttaarggcatctgtc

SEQ ID NO: 12477 - DNA, 21 bp, Homo sapiens
gagcctcccakcagccttgca

SEQ ID NO: 12478 - DNA, 21 bp, Homo sapiens
ggcaggattcrgacccacagg

SEQ ID NO: 12479 - DNA, 21 bp, Homo sapiens
gtagtaaattrtcacaaattt

SEQ ID NO: 12480 - DNA, 21 bp, Homo sapiens
tacttgtgctragtaaataat

SEQ ID NO: 12481 - DNA, 21 bp, Homo sapiens
taaccttctakagattgcagc

SEQ ID NO: 12482 - DNA, 21 bp, Homo sapiens
atacatttgtrtatatacttt

SEQ ID NO: 12483 - DNA, 21 bp, Homo sapiens
tcttagatttmtttaaggaca

SEQ ID NO: 12484 - DNA, 21 bp, Homo sapiens
aggtcaaaacycttagcctgc

SEQ ID NO: 12485 - DNA, 21 bp, Homo sapiens
tgagtgcttaytctatgccag

SEQ ID NO: 12486 - DNA, 21 bp, Homo sapiens
gaagcctccckggccatcaaa

SEQ ID NO: 12487 - DNA, 21 bp, Homo sapiens
cccccatcccrccccatcccc

SEQ ID NO: 12488 - DNA, 21 bp, Homo sapiens
acatgagtagwctcaaatcaa

SEQ ID NO: 12489 - DNA, 21 bp, Homo sapiens
tgtcaggattrgcagataccc

SEQ ID NO: 12490 - DNA, 21 bp, Homo sapiens
gttgtgtgtgytgcaggtgtc

SEQ ID NO: 12491 - DNA, 21 bp, Homo sapiens
aggtaaccaaygtgttgggct

SEQ ID NO: 12492 - DNA, 21 bp, Homo sapiens
ttaaacttgcyggacctcctg

SEQ ID NO: 12493 - DNA, 21 bp, Homo sapiens
gatcaaaagcstgcaaaggaa

SEQ ID NO: 12494 - DNA, 21 bp, Homo sapiens
aaataagcacrtaacaggtgc

SEQ ID NO: 12495 - DNA, 21 bp, Homo sapiens
actaaagttgyatatcttgtc

SEQ ID NO: 12496 - DNA, 21 bp, Homo sapiens
tggggcatttygaggttattc

SEQ ID NO: 12497 - DNA, 21 bp, Homo sapiens
atagggcagcratattaactt

SEQ ID NO: 12498 - DNA, 21 bp, Homo sapiens
gaaaagcactrctgttggaca

SEQ ID NO: 12499 - DNA, 21 bp, Homo sapiens
tgctgatgacygccaggggcc

SEQ ID NO: 12500 - DNA, 21 bp, Homo sapiens
cacaccaggckcttctgaaaa

SEQ ID NO: 12501 - DNA, 21 bp, Homo sapiens
cctcaacttcmctcacaaacg

SEQ ID NO: 12502 - DNA, 21 bp, Homo sapiens
aggaggcaccraagtgttctc

SEQ ID NO: 12503 - DNA, 21 bp, Homo sapiens
tcactcagagyatgcactcca

SEQ ID NO: 12504 - DNA, 21 bp, Homo sapiens
ttttactagtstagcttcatc

SEQ ID NO: 12505 - DNA, 21 bp, Homo sapiens
cagatttgaamtccatgtccc

SEQ ID NO: 12506 - DNA, 21 bp, Homo sapiens
ggggctcctcrgcctttgaag

SEQ ID NO: 12507 - DNA, 21 bp, Homo sapiens
cggcctgggarcttgttaagt

SEQ ID NO: 12508 - DNA, 21 bp, Homo sapiens
agggcaagagrattctgctgg

SEQ ID NO: 12509 - DNA, 21 bp, Homo sapiens
tactctaagcstgctggtgtc

SEQ ID NO: 12510 - DNA, 21 bp, Homo sapiens
tttgcatttcrttgttcccta

SEQ ID NO: 12511 - DNA, 21 bp, Homo sapiens
gtttctgtgcmcaccaggctg

SEQ ID NO: 12512 - DNA, 21 bp, Homo sapiens
cggtccatacrtacacacaca

SEQ ID NO: 12513 - DNA, 21 bp, Homo sapiens
acctggcagayaccaccttat

SEQ ID NO: 12514 - DNA, 21 bp, Homo sapiens
gccagcacccwcagcctgcct

SEQ ID NO: 12515 - DNA, 21 bp, Homo sapiens
agatagtacaracagttccca

SEQ ID NO: 12516 - DNA, 21 bp, Homo sapiens
tgtgtgcaccyaagaaagctc

SEQ ID NO: 12517 - DNA, 21 bp, Homo sapiens
atggctacttygtcctcgtag

SEQ ID NO: 12518 - DNA, 21 bp, Homo sapiens
ctgagcctgcmttggaaatgc

SEQ ID NO: 12519 - DNA, 21 bp, Homo sapiens
tgcctgtgctscaatcagccc

SEQ ID NO: 12520 - DNA, 21 bp, Homo sapiens
ggcccagctcrgggattccat

SEQ ID NO: 12521 - DNA, 21 bp, Homo sapiens
cctgggttctrgttccttcca

SEQ ID NO: 12522 - DNA, 21 bp, Homo sapiens
gtatcgcatargttacccttc

SEQ ID NO: 12523 - DNA, 21 bp, Homo sapiens
cagcaaaactmagaccctaga

SEQ ID NO: 12524 - DNA, 21 bp, Homo sapiens
cttcatttatrtaaagctcaa

SEQ ID NO: 12525 - DNA, 21 bp, Homo sapiens
ggaagatgcayggtagtcaac

SEQ ID NO: 12526 - DNA, 21 bp, Homo sapiens
atgatgtgcarttcctattct

SEQ ID NO: 12527 - DNA, 21 bp, Homo sapiens
atggttccccygactttgcca

SEQ ID NO: 12528 - DNA, 21 bp, Homo sapiens
tagctcatagkgttccaaccc

SEQ ID NO: 12529 - DNA, 21 bp, Homo sapiens
gggctttgaamcaaggtctct

SEQ ID NO: 12530 - DNA, 21 bp, Homo sapiens
tcatggtgccsccccgcccaa

SEQ ID NO: 12531 - DNA, 21 bp, Homo sapiens
ctgccagaaayagaaagagag

SEQ ID NO: 12532 - DNA, 21 bp, Homo sapiens
tacagcagccrgaggtctcat

SEQ ID NO: 12533 - DNA, 21 bp, Homo sapiens
caatctccacractccaaagt

SEQ ID NO: 12534 - DNA, 21 bp, Homo sapiens
cacacctgtgytttcaaaagc

SEQ ID NO: 12535 - DNA, 21 bp, Homo sapiens
ctaaataatgytccatccttc

SEQ ID NO: 12536 - DNA, 21 bp, Homo sapiens
tttgcagatgrggaaaccgag

SEQ ID NO: 12537 - DNA, 21 bp, Homo sapiens
tactgtgggtrgtgggagcac

SEQ ID NO: 12538 - DNA, 21 bp, Homo sapiens
aaacatacccrcgctggctgg

SEQ ID NO: 12539 - DNA, 21 bp, Homo sapiens
atgccttgttsctcccagacc

SEQ ID NO: 12540 - DNA, 21 bp, Homo sapiens
cctcatgggarggagtacgca

SEQ ID NO: 12541 - DNA, 21 bp, Homo sapiens
ggtcggaatgyggggcagcgc

SEQ ID NO: 12542 - DNA, 21 bp, Homo sapiens
gaccctccagscttctggaag

SEQ ID NO: 12543 - DNA, 21 bp, Homo sapiens
ataacagaatrccactgcctg

SEQ ID NO: 12544 - DNA, 21 bp, Homo sapiens
ttatttgattsctgtcctagg

SEQ ID NO: 12545 - DNA, 21 bp, Homo sapiens
ggtcggtgccygacccttcca

SEQ ID NO: 12546 - DNA, 21 bp, Homo sapiens
ctaatagagaraggaggaaaa

SEQ ID NO: 12547 - DNA, 21 bp, Homo sapiens
cacaccctgcmggcactgctc

SEQ ID NO: 12548 - DNA, 21 bp, Homo sapiens
tggacagagcytgctcttccc

SEQ ID NO: 12549 - DNA, 21 bp, Homo sapiens
cacccaggacrgttcccagca

SEQ ID NO: 12550 - DNA, 21 bp, Homo sapiens
tagcccgcccrcctgccctct

SEQ ID NO: 12551 - DNA, 21 bp, Homo sapiens
gatcgaggcayagcgccagtc

SEQ ID NO: 12552 - DNA, 21 bp, Homo sapiens
ctctacgaccrccgtgacctg

SEQ ID NO: 12553 - DNA, 21 bp, Homo sapiens
ccaccttcaaygtcatcgtca

SEQ ID NO: 12554 - DNA, 21 bp, Homo sapiens
atatagctggrataaaatcta

SEQ ID NO: 12555 - DNA, 21 bp, Homo sapiens
tccaataccaygcactgcccc

SEQ ID NO: 12556 - DNA, 21 bp, Homo sapiens
tttttggctcrtagcatcaat

SEQ ID NO: 12557 - DNA, 21 bp, Homo sapiens
cctattgacargagctgtaac

SEQ ID NO: 12558 - DNA, 21 bp, Homo sapiens
gaggggcataycagctcactg

SEQ ID NO: 12559 - DNA, 21 bp, Homo sapiens
cccttcctgtscctccgctca

SEQ ID NO: 12560 - DNA, 21 bp, Homo sapiens
tgagaaagcaragccctccat

SEQ ID NO: 12561 - DNA, 21 bp, Homo sapiens
atgaagatccrgacttttggc

SEQ ID NO: 12562 - DNA, 21 bp, Homo sapiens
aaggatctgcyacaacgatca

SEQ ID NO: 12563 - DNA, 21 bp, Homo sapiens
tcatcagtgcsggtggtttca

SEQ ID NO: 12564 - DNA, 21 bp, Homo sapiens
tgaaaatgaayaaagtgagcc

SEQ ID NO: 12565 - DNA, 21 bp, Homo sapiens
gtaagttacayggacagatgg

SEQ ID NO: 12566 - DNA, 21 bp, Homo sapiens
ctagttgtccrtagtgtggcc

SEQ ID NO: 12567 - DNA, 21 bp, Homo sapiens
ctgaaaatgtrtcttttaaac

SEQ ID NO: 12568 - DNA, 21 bp, Homo sapiens
cctctctttcrcttccacaga

SEQ ID NO: 12569 - DNA, 21 bp, Homo sapiens
caaattacacrgaccgggaca

SEQ ID NO: 12570 - DNA, 21 bp, Homo sapiens
agcttcccagmaggaatgagg

SEQ ID NO: 12571 - DNA, 21 bp, Homo sapiens
aaatgtgatgrtagtccaaat

SEQ ID NO: 12572 - DNA, 21 bp, Homo sapiens
aaattgaacckaagtcaatta

SEQ ID NO: 12573 - DNA, 21 bp, Homo sapiens
gtgtcatccasctgacaattt

SEQ ID NO: 12574 - DNA, 21 bp, Homo sapiens
ttggggccagsaggaaggcaa

SEQ ID NO: 12575 - DNA, 21 bp, Homo sapiens
tcagctgggcygtcatggaac

SEQ ID NO: 12576 - DNA, 21 bp, Homo sapiens
ccccactccayttggtgtgct

SEQ ID NO: 12577 - DNA, 21 bp, Homo sapiens
tattggagtcygggtcagcac

SEQ ID NO: 12578 - DNA, 21 bp, Homo sapiens
tccaagcatgmgctgtctctc

SEQ ID NO: 12579 - DNA, 21 bp, Homo sapiens
tcccaattgtyccctgtttct

SEQ ID NO: 12580 - DNA, 21 bp, Homo sapiens
ttgttgagggygcctgaagag

SEQ ID NO: 12581 - DNA, 21 bp, Homo sapiens
tagaatcttcyagacatttcg

SEQ ID NO: 12582 - DNA, 21 bp, Homo sapiens
atgcacacatrttcatctttc

SEQ ID NO: 12583 - DNA, 21 bp, Homo sapiens
catataccgcrtcctaagcgt

SEQ ID NO: 12584 - DNA, 21 bp, Homo sapiens
tggagtgagcmccatatttga

SEQ ID NO: 12585 - DNA, 21 bp, Homo sapiens
tgacagcataytgaaaacagt

SEQ ID NO: 12586 - DNA, 21 bp, Homo sapiens
gcacggccagrgcggcattct

SEQ ID NO: 12587 - DNA, 21 bp, Homo sapiens
tgtttctaacwttttgccatt

SEQ ID NO: 12588 - DNA, 21 bp, Homo sapiens
ggggtatgtcygtggaatctg

SEQ ID NO: 12589 - DNA, 21 bp, Homo sapiens
atggccagccscttcacaatc

SEQ ID NO: 12590 - DNA, 21 bp, Homo sapiens
gagaaagtggyaaatgccccc

SEQ ID NO: 12591 - DNA, 21 bp, Homo sapiens
cgggaatgccrgcacacagcc

SEQ ID NO: 12592 - DNA, 21 bp, Homo sapiens
ccctccctcarccctccccgt

SEQ ID NO: 12593 - DNA, 21 bp, Homo sapiens
ggaaagataaygctgaaggca

SEQ ID NO: 12594 - DNA, 21 bp, Homo sapiens
gcacctcttcrggggaggatt

SEQ ID NO: 12595 - DNA, 21 bp, Homo sapiens
cagaggggctyccaacattca

SEQ ID NO: 12596 - DNA, 21 bp, Homo sapiens
acagccacacrgctgggcatt

SEQ ID NO: 12597 - DNA, 21 bp, Homo sapiens
agaccctcttsatggttctgg

SEQ ID NO: 12598 - DNA, 21 bp, Homo sapiens
gccaatgtcawagaatacaaa

SEQ ID NO: 12599 - DNA, 21 bp, Homo sapiens
agagaaaacayggtccctgcc

SEQ ID NO: 12600 - DNA, 21 bp, Homo sapiens
ataagccagtyccaaaaagac

SEQ ID NO: 12601 - DNA, 21 bp, Homo sapiens
ataaactcccmtaaatgtccc

SEQ ID NO: 12602 - DNA, 21 bp, Homo sapiens
gctgcaaccascacatctgtg

SEQ ID NO: 12603 - DNA, 21 bp, Homo sapiens
ctgcctcttgrgctcaaagtt

SEQ ID NO: 12604 - DNA, 21 bp, Homo sapiens
caaccgatgcrgtgaaaagcc

SEQ ID NO: 12605 - DNA, 21 bp, Homo sapiens
tatgttttcaygctttgaagt

SEQ ID NO: 12606 - DNA, 21 bp, Homo sapiens
tacatcctttstctctccatt

SEQ ID NO: 12607 - DNA, 21 bp, Homo sapiens
acagccctgakggctataaac

SEQ ID NO: 12608 - DNA, 21 bp, Homo sapiens
aggttaacaaytggacccatt

SEQ ID NO: 12609 - DNA, 21 bp, Homo sapiens
tgaagtgctcratgtaattta

SEQ ID NO: 12610 - DNA, 21 bp, Homo sapiens
agcgtttcccrtcattacaag

SEQ ID NO: 12611 - DNA, 21 bp, Homo sapiens
gcctgggagcrgcttgtttct

SEQ ID NO: 12612 - DNA, 21 bp, Homo sapiens
gggcatttgtraaaatgcagg

SEQ ID NO: 12613 - DNA, 21 bp, Homo sapiens
aacacccatckccccgtgtcc

SEQ ID NO: 12614 - DNA, 21 bp, Homo sapiens
tcggtcagtaragtgttgacg

SEQ ID NO: 12615 - DNA, 21 bp, Homo sapiens
tcttggttgcraccacagagg

SEQ ID NO: 12616 - DNA, 21 bp, Homo sapiens
atccaccaacstgacctgcct

SEQ ID NO: 12617 - DNA, 21 bp, Homo sapiens
tgcatggagcrtaagactgca

SEQ ID NO: 12618 - DNA, 21 bp, Homo sapiens
tcaatccatgyaccagatctg

SEQ ID NO: 12619 - DNA, 21 bp, Homo sapiens
aacttcactcragagctcgcc

SEQ ID NO: 12620 - DNA, 21 bp, Homo sapiens
gaaaaatgcartgaacacaag

SEQ ID NO: 12621 - DNA, 21 bp, Homo sapiens
gtgacttcacrtgcgctgctg

SEQ ID NO: 12622 - DNA, 21 bp, Homo sapiens
tcccctggagrgccctcaact

SEQ ID NO: 12623 - DNA, 21 bp, Homo sapiens
cctctcggtgmatcaagatgg

SEQ ID NO: 12624 - DNA, 21 bp, Homo sapiens
gagaaagaatytggaccccat

SEQ ID NO: 12625 - DNA, 21 bp, Homo sapiens
agttggtgctstttgaatgcg

SEQ ID NO: 12626 - DNA, 21 bp, Homo sapiens
ttgaatgcgtyttgatgatat

SEQ ID NO: 12627 - DNA, 21 bp, Homo sapiens
tacacaaaccrttttgtgcag

SEQ ID NO: 12628 - DNA, 21 bp, Homo sapiens
gcagaacaagyaactgcacaa

SEQ ID NO: 12629 - DNA, 21 bp, Homo sapiens
tcctctcagcrggagaatcag

SEQ ID NO: 12630 - DNA, 21 bp, Homo sapiens
gcagtgtgtgragttacattt

SEQ ID NO: 12631 - DNA, 21 bp, Homo sapiens
tatatcaaacytgtccctcga

SEQ ID NO: 12632 - DNA, 21 bp, Homo sapiens
tgagagccacrctgaagctct

SEQ ID NO: 12633 - DNA, 21 bp, Homo sapiens
acggcagcacyggcaggcacc

SEQ ID NO: 12634 - DNA, 21 bp, Homo sapiens
gaagagtcacrgcaggaattg

SEQ ID NO: 12635 - DNA, 21 bp, Homo sapiens
acggtcccccrggaagaagaa

SEQ ID NO: 12636 - DNA, 21 bp, Homo sapiens
gcctctccccrcccagacccc

SEQ ID NO: 12637 - DNA, 21 bp, Homo sapiens
ttctgtcccaragtaagaggc

SEQ ID NO: 12638 - DNA, 21 bp, Homo sapiens
gtgaggcgggsaagcggctct

SEQ ID NO: 12639 - DNA, 21 bp, Homo sapiens
atttctgcagkgaaacatgaa

SEQ ID NO: 12640 - DNA, 21 bp, Homo sapiens
cgggagctccrggggtgtgat

SEQ ID NO: 12641 - DNA, 21 bp, Homo sapiens
tctggctgcaygagcgcttcc

SEQ ID NO: 12642 - DNA, 21 bp, Homo sapiens
ctttgcccccrctccacagtg

SEQ ID NO: 12643 - DNA, 21 bp, Homo sapiens
acagtgtacascggcccagta

SEQ ID NO: 12644 - DNA, 21 bp, Homo sapiens
gcccaagaccyaggggagcca

SEQ ID NO: 12645 - DNA, 21 bp, Homo sapiens
acagcccacartgggtggaag

SEQ ID NO: 12646 - DNA, 21 bp, Homo sapiens
cccccacccayacctgccccc

SEQ ID NO: 12647 - DNA, 21 bp, Homo sapiens
aggaactcccrcctgtcagct

SEQ ID NO: 12648 - DNA, 21 bp, Homo sapiens
aggtgagcccstctccagcct

SEQ ID NO: 12649 - DNA, 21 bp, Homo sapiens
gtagaggacgygctgccgtga

SEQ ID NO: 12650 - DNA, 21 bp, Homo sapiens
cggatggcacrtaggccgggg

SEQ ID NO: 12651 - DNA, 21 bp, Homo sapiens
aggcatggctratggtggctg

SEQ ID NO: 12652 - DNA, 21 bp, Homo sapiens
agttacctaayctgagtgtca

SEQ ID NO: 12653 - DNA, 21 bp, Homo sapiens
cttttccctgygtctaaacca

SEQ ID NO: 12654 - DNA, 21 bp, Homo sapiens
tgtggcctgayctctcccatc

SEQ ID NO: 12655 - DNA, 21 bp, Homo sapiens
gagaggcagaratctctgaga

SEQ ID NO: 12656 - DNA, 21 bp, Homo sapiens
ctccccttacraggagaggta

SEQ ID NO: 12657 - DNA, 21 bp, Homo sapiens
cagcctccaamaacacatcgc

SEQ ID NO: 12658 - DNA, 21 bp, Homo sapiens
acccagtcacygcagaagcag

SEQ ID NO: 12659 - DNA, 21 bp, Homo sapiens
ggggtgatatsatcaactcga

SEQ ID NO: 12660 - DNA, 21 bp, Homo sapiens
ccagctgtgcrtccaagtacc

SEQ ID NO: 12661 - DNA, 21 bp, Homo sapiens
ccatttgcccrgtttggccta

SEQ ID NO: 12662 - DNA, 21 bp, Homo sapiens
cagaacttccrggtccagtgg

SEQ ID NO: 12663 - DNA, 21 bp, Homo sapiens
tttgtaaacaytggacatcag

SEQ ID NO: 12664 - DNA, 21 bp, Homo sapiens
gagctatggarcaacctctag

SEQ ID NO: 12665 - DNA, 21 bp, Homo sapiens
aggaacatgamacaagataga

SEQ ID NO: 12666 - DNA, 21 bp, Homo sapiens
ttcatgatcartgatacagct

SEQ ID NO: 12667 - DNA, 21 bp, Homo sapiens
acttcgaaatragactgatgg

SEQ ID NO: 12668 - DNA, 21 bp, Homo sapiens
caggtgtctgyagggttgcag

SEQ ID NO: 12669 - DNA, 21 bp, Homo sapiens
aggggctgtgrcaggtgttat

SEQ ID NO: 12670 - DNA, 21 bp, Homo sapiens
gtgacagacaygatgattcta

SEQ ID NO: 12671 - DNA, 21 bp, Homo sapiens
ctggaactccygcagccatat

SEQ ID NO: 12672 - DNA, 21 bp, Homo sapiens
caagtcctgcmgagggaagct

SEQ ID NO: 12673 - DNA, 21 bp, Homo sapiens
gagttggcatrtgcctctccc

SEQ ID NO: 12674 - DNA, 21 bp, Homo sapiens
cagaaagcatsagttgttcat

SEQ ID NO: 12675 - DNA, 21 bp, Homo sapiens
cctctgttcaygcccctgggc

SEQ ID NO: 12676 - DNA, 21 bp, Homo sapiens
tcttttgttaygaggttggag

SEQ ID NO: 12677 - DNA, 21 bp, Homo sapiens
agattcataamctttgttgag

SEQ ID NO: 12678 - DNA, 21 bp, Homo sapiens
accccagcacygatatgtacg

SEQ ID NO: 12679 - DNA, 21 bp, Homo sapiens
ctacatctgcmcatctgtcta

SEQ ID NO: 12680 - DNA, 21 bp, Homo sapiens
aagcacagctsaaatcatgag

SEQ ID NO: 12681 - DNA, 21 bp, Homo sapiens
cacaaaaaagracaattttag

SEQ ID NO: 12682 - DNA, 21 bp, Homo sapiens
gggttcacacsccaggccacc

SEQ ID NO: 12683 - DNA, 21 bp, Homo sapiens
aagctgggccyatcaaaacag

SEQ ID NO: 12684 - DNA, 21 bp, Homo sapiens
acaactcacaytgactcacta

SEQ ID NO: 12685 - DNA, 21 bp, Homo sapiens
caaaagcaagmcacaaggccc

SEQ ID NO: 12686 - DNA, 21 bp, Homo sapiens
cagtgatgccygtggttcaga

SEQ ID NO: 12687 - DNA, 21 bp, Homo sapiens
gcaagctacarctcatctcac

SEQ ID NO: 12688 - DNA, 21 bp, Homo sapiens
aagggccttgrcaaattaatt

SEQ ID NO: 12689 - DNA, 21 bp, Homo sapiens
tttcagaccamcataattcct

SEQ ID NO: 12690 - DNA, 21 bp, Homo sapiens
ccatcgcctgygctgagggct

SEQ ID NO: 12691 - DNA, 21 bp, Homo sapiens
gtgcattggayggcttctaca

SEQ ID NO: 12692 - DNA, 21 bp, Homo sapiens
tttcttgactwgctaacacct

SEQ ID NO: 12693 - DNA, 21 bp, Homo sapiens
aaaaaaaagtsaattacagcg

SEQ ID NO: 12694 - DNA, 21 bp, Homo sapiens
gacaactactsgtgcatcttc

SEQ ID NO: 12695 - DNA, 21 bp, Homo sapiens
cagagtctccyggacacagtg

SEQ ID NO: 12696 - DNA, 21 bp, Homo sapiens
acacagatgcyccttgactta

SEQ ID NO: 12697 - DNA, 21 bp, Homo sapiens
cctctttgggyctcagtttcc

SEQ ID NO: 12698 - DNA, 21 bp, Homo sapiens
cctggcacagsaggatgacaa

SEQ ID NO: 12699 - DNA, 21 bp, Homo sapiens
gcagcgtcatyccgcattcag

SEQ ID NO: 12700 - DNA, 21 bp, Homo sapiens
cctgaggccarcctctggagg

SEQ ID NO: 12701 - DNA, 21 bp, Homo sapiens
atgctcacacrgacgcacact

SEQ ID NO: 12702 - DNA, 21 bp, Homo sapiens
attcaagttcrgctccattac

SEQ ID NO: 12703 - DNA, 21 bp, Homo sapiens
aggaagagttsgataaggggt

SEQ ID NO: 12704 - DNA, 21 bp, Homo sapiens
tagtacccagmttgtcttcac

SEQ ID NO: 12705 - DNA, 21 bp, Homo sapiens
cccattacccytcccagagca

SEQ ID NO: 12706 - DNA, 21 bp, Homo sapiens
ggccctcaaamgggcagaggg

SEQ ID NO: 12707 - DNA, 21 bp, Homo sapiens
atggtccatgsgtttctagag

SEQ ID NO: 12708 - DNA, 21 bp, Homo sapiens
aactggggccycccgtctgcc

SEQ ID NO: 12709 - DNA, 21 bp, Homo sapiens
ctccctggcckggggccctag

SEQ ID NO: 12710 - DNA, 21 bp, Homo sapiens
aacgtccaaaytgcccctggc

SEQ ID NO: 12711 - DNA, 21 bp, Homo sapiens
ctaagcccatmatccttggga

SEQ ID NO: 12712 - DNA, 21 bp, Homo sapiens
ttctggtagtytctctagtct

SEQ ID NO: 12713 - DNA, 21 bp, Homo sapiens
cagtccctcaraatgctggta

SEQ ID NO: 12714 - DNA, 21 bp, Homo sapiens
agatattgggktaaataaaat

SEQ ID NO: 12715 - DNA, 21 bp, Homo sapiens
agcaacatgaycttttgaaaa

SEQ ID NO: 12716 - DNA, 21 bp, Homo sapiens
atctcacagarttcccacccc

SEQ ID NO: 12717 - DNA, 21 bp, Homo sapiens
ctgcaaagccraaagccttca

SEQ ID NO: 12718 - DNA, 21 bp, Homo sapiens
tgtgtcagagwtggctggagg

SEQ ID NO: 12719 - DNA, 21 bp, Homo sapiens
aggcccactaygcaacactaa

SEQ ID NO: 12720 - DNA, 21 bp, Homo sapiens
caaccatttakattctagcca

SEQ ID NO: 12721 - DNA, 21 bp, Homo sapiens
cagtttgttgwtaggtgttaa

SEQ ID NO: 12722 - DNA, 21 bp, Homo sapiens
ggactggcaaragtacaggtc

SEQ ID NO: 12723 - DNA, 21 bp, Homo sapiens
aatttgttaamtggccattat

SEQ ID NO: 12724 - DNA, 21 bp, Homo sapiens
tcacatagcaytaagtaccta

SEQ ID NO: 12725 - DNA, 21 bp, Homo sapiens
ctgttctacawacaaagtctt

SEQ ID NO: 12726 - DNA, 21 bp, Homo sapiens
cctctttgacrggccgaagcc

SEQ ID NO: 12727 - DNA, 21 bp, Homo sapiens
gccaatctccrggcccaaacg

SEQ ID NO: 12728 - DNA, 21 bp, Homo sapiens
aggctggccaygtccctgggc

SEQ ID NO: 12729 - DNA, 21 bp, Homo sapiens
aatggaaccartcttattgtt

SEQ ID NO: 12730 - DNA, 21 bp, Homo sapiens
cactccactcyttccacctcc

SEQ ID NO: 12731 - DNA, 21 bp, Homo sapiens
gaacgtggtcrccaaggccat

SEQ ID NO: 12732 - DNA, 21 bp, Homo sapiens
acccctcctamacctctgggg

SEQ ID NO: 12733 - DNA, 21 bp, Homo sapiens
agttgtctgtyctgctcctgg

SEQ ID NO: 12734 - DNA, 21 bp, Homo sapiens
gggcttttctyagcattgaat

SEQ ID NO: 12735 - DNA, 21 bp, Homo sapiens
cctatggagayggggagctgg

SEQ ID NO: 12736 - DNA, 21 bp, Homo sapiens
cagaagctgcrtgggccgcca

SEQ ID NO: 12737 - DNA, 21 bp, Homo sapiens
tcaggtgcagsgctgcatgga

SEQ ID NO: 12738 - DNA, 21 bp, Homo sapiens
gggatggaatmtttttgcttc

SEQ ID NO: 12739 - DNA, 21 bp, Homo sapiens
gggtacaaatktccaattcat

SEQ ID NO: 12740 - DNA, 21 bp, Homo sapiens
gctttacggasaggtggatgt

SEQ ID NO: 12741 - DNA, 21 bp, Homo sapiens
gtgttggaatsagaagaggac

SEQ ID NO: 12742 - DNA, 21 bp, Homo sapiens
acttattccayccaattgttt

SEQ ID NO: 12743 - DNA, 21 bp, Homo sapiens
ggcatattctygaaagttaca

SEQ ID NO: 12744 - DNA, 21 bp, Homo sapiens
taaggaaataytaaaactaca

SEQ ID NO: 12745 - DNA, 21 bp, Homo sapiens
cattgttaagratcatggcag

SEQ ID NO: 12746 - DNA, 21 bp, Homo sapiens
ccgcgagccgkagcggggcgc

SEQ ID NO: 12747 - DNA, 21 bp, Homo sapiens
ataattttgcwaatcactttc

SEQ ID NO: 12748 - DNA, 21 bp, Homo sapiens
ctacataaaarccctcttgca

SEQ ID NO: 12749 - DNA, 21 bp, Homo sapiens
tttacacaaayttactccatc

SEQ ID NO: 12750 - DNA, 21 bp, Homo sapiens
caggataaatrtttgattttt

SEQ ID NO: 12751 - DNA, 21 bp, Homo sapiens
ttctatctatygctcctttct

SEQ ID NO: 12752 - DNA, 21 bp, Homo sapiens
atctttaaaayatagataata

SEQ ID NO: 12753 - DNA, 21 bp, Homo sapiens
cttcccattcyatgtgatgtt

SEQ ID NO: 12754 - DNA, 21 bp, Homo sapiens
agttcctagartgccattgac

SEQ ID NO: 12755 - DNA, 21 bp, Homo sapiens
ggagttgttgrtgacccaata

SEQ ID NO: 12756 - DNA, 21 bp, Homo sapiens
tttcatttaaytctgtgatgt

SEQ ID NO: 12757 - DNA, 21 bp, Homo sapiens
atgcagtttarctttgccatt

SEQ ID NO: 12758 - DNA, 21 bp, Homo sapiens
aggtaaagatraccacaattc

SEQ ID NO: 12759 - DNA, 21 bp, Homo sapiens
tgagcaaatastattgcaagt

SEQ ID NO: 12760 - DNA, 21 bp, Homo sapiens
actaatgacasgcatctcttg

SEQ ID NO: 12761 - DNA, 21 bp, Homo sapiens
tcagtaatttrcacatcactg

SEQ ID NO: 12762 - DNA, 21 bp, Homo sapiens
tttatgtgtcrttcctaactt

SEQ ID NO: 12763 - DNA, 21 bp, Homo sapiens
tatttattgaytcattaattt

SEQ ID NO: 12764 - DNA, 21 bp, Homo sapiens
aggctatgaayggtcattgtc

SEQ ID NO: 12765 - DNA, 21 bp, Homo sapiens
gggaggagagsagtcagatct

SEQ ID NO: 12766 - DNA, 21 bp, Homo sapiens
ttttgcatctrtaaagtgggg

SEQ ID NO: 12767 - DNA, 21 bp, Homo sapiens
aatgagaattkgtgatcatgt

SEQ ID NO: 12768 - DNA, 21 bp, Homo sapiens
atattcctgayaataatttga

SEQ ID NO: 12769 - DNA, 21 bp, Homo sapiens
cctatttcaartctttatatt

SEQ ID NO: 12770 - DNA, 21 bp, Homo sapiens
tttcaagaaayttcaaaacta

SEQ ID NO: 12771 - DNA, 21 bp, Homo sapiens
cagaacggagycttccttatc

SEQ ID NO: 12772 - DNA, 21 bp, Homo sapiens
gatggccactrggaatatgaa

SEQ ID NO: 12773 - DNA, 21 bp, Homo sapiens
ggcttataaastaatctttaa

SEQ ID NO: 12774 - DNA, 21 bp, Homo sapiens
gcctcttatgrctgttgttct

SEQ ID NO: 12775 - DNA, 21 bp, Homo sapiens
cctgtgtgagsacatctcctt

SEQ ID NO: 12776 - DNA, 21 bp, Homo sapiens
ggggtgggggraccggaagcc

SEQ ID NO: 12777 - DNA, 21 bp, Homo sapiens
ttagttatttrtgtaagtaat

SEQ ID NO: 12778 - DNA, 21 bp, Homo sapiens
ccatctactaygcaaatatct

SEQ ID NO: 12779 - DNA, 21 bp, Homo sapiens
caaaccaataragtactaaga

SEQ ID NO: 12780 - DNA, 21 bp, Homo sapiens
actaactccartggtggagtg

SEQ ID NO: 12781 - DNA, 21 bp, Homo sapiens
aacccagaggstgtcccttca

SEQ ID NO: 12782 - DNA, 21 bp, Homo sapiens
gtagaccctcrtggaacttac

SEQ ID NO: 12783 - DNA, 21 bp, Homo sapiens
gcccttacagytgctcctagc

SEQ ID NO: 12784 - DNA, 21 bp, Homo sapiens
tgtaaaatgcrcatcacagta

SEQ ID NO: 12785 - DNA, 21 bp, Homo sapiens
tcagccacagrtttaattatt

SEQ ID NO: 12786 - DNA, 21 bp, Homo sapiens
ctggagcatcygattaatctt

SEQ ID NO: 12787 - DNA, 21 bp, Homo sapiens
tggggtgtgtstgcattatta

SEQ ID NO: 12788 - DNA, 21 bp, Homo sapiens
gcctcaacttytggctacagt

SEQ ID NO: 12789 - DNA, 21 bp, Homo sapiens
tgggatgtttycttttcctcc

SEQ ID NO: 12790 - DNA, 21 bp, Homo sapiens
aattcaattcygattaactat

SEQ ID NO: 12791 - DNA, 21 bp, Homo sapiens
gtccatgtcgrgaaagacgaa

SEQ ID NO: 12792 - DNA, 21 bp, Homo sapiens
tgattcaaaartaagaataat

SEQ ID NO: 12793 - DNA, 21 bp, Homo sapiens
gtaggtgcaasagaggaatac

SEQ ID NO: 12794 - DNA, 21 bp, Homo sapiens
tggttgttttrttcacttttt

SEQ ID NO: 12795 - DNA, 21 bp, Homo sapiens
attccaatgayctaaatgtct

SEQ ID NO: 12796 - DNA, 21 bp, Homo sapiens
tgtctggtttygtaggtctaa

SEQ ID NO: 12797 - DNA, 21 bp, Homo sapiens
aaatgtgttckgggtttgaag

SEQ ID NO: 12798 - DNA, 21 bp, Homo sapiens
cccgtcaaatygtatgatgtc

SEQ ID NO: 12799 - DNA, 21 bp, Homo sapiens
tccctttcccrgcaacttatt

SEQ ID NO: 12800 - DNA, 21 bp, Homo sapiens
atctttggcawtgactcctgt

SEQ ID NO: 12801 - DNA, 21 bp, Homo sapiens
ggggagatttrttggggacag

SEQ ID NO: 12802 - DNA, 21 bp, Homo sapiens
gtttattgtaytgggcttaaa

SEQ ID NO: 12803 - DNA, 21 bp, Homo sapiens
acctgtgtccyagataagaac

SEQ ID NO: 12804 - DNA, 21 bp, Homo sapiens
gttagatcacrtacttcctta

SEQ ID NO: 12805 - DNA, 21 bp, Homo sapiens
ctggtcaaaakaaatttgagg

SEQ ID NO: 12806 - DNA, 21 bp, Homo sapiens
attggattctyttttttctgt

SEQ ID NO: 12807 - DNA, 21 bp, Homo sapiens
cacccctatcrcatggggtgt

SEQ ID NO: 12808 - DNA, 21 bp, Homo sapiens
aaagcttactstgtttaaaac

SEQ ID NO: 12809 - DNA, 21 bp, Homo sapiens
ccaatcagccwgtaagcctat

SEQ ID NO: 12810 - DNA, 21 bp, Homo sapiens
catttgtgtcrcttagtatta

SEQ ID NO: 12811 - DNA, 21 bp, Homo sapiens
aattgttctayagaatcttgt

SEQ ID NO: 12812 - DNA, 21 bp, Homo sapiens
tagtatattcraaaactccag

SEQ ID NO: 12813 - DNA, 21 bp, Homo sapiens
tacttgattcrcgctttctct

SEQ ID NO: 12814 - DNA, 21 bp, Homo sapiens
ctccttcagakgctgttggga

SEQ ID NO: 12815 - DNA, 21 bp, Homo sapiens
aggaactgtcyacacttttgc

SEQ ID NO: 12816 - DNA, 21 bp, Homo sapiens
agcaacctttrtatcttttct

SEQ ID NO: 12817 - DNA, 21 bp, Homo sapiens
atacatattgsttccaacact

SEQ ID NO: 12818 - DNA, 21 bp, Homo sapiens
agacaagactygcactttgca

SEQ ID NO: 12819 - DNA, 21 bp, Homo sapiens
agtctgtttcrctgcagaaac

SEQ ID NO: 12820 - DNA, 21 bp, Homo sapiens
tatgtactacmtcatctccaa

SEQ ID NO: 12821 - DNA, 21 bp, Homo sapiens
ggagattaggrttagcctcaa

SEQ ID NO: 12822 - DNA, 21 bp, Homo sapiens
attaaaattcyagggcctgag

SEQ ID NO: 12823 - DNA, 21 bp, Homo sapiens
cttgggctgcrctatctcctc

SEQ ID NO: 12824 - DNA, 21 bp, Homo sapiens
atcctgacttyggattgctcc

SEQ ID NO: 12825 - DNA, 21 bp, Homo sapiens
tatgtttcccygctgaacaac

SEQ ID NO: 12826 - DNA, 21 bp, Homo sapiens
cttaggttttrtacatttcag

SEQ ID NO: 12827 - DNA, 21 bp, Homo sapiens
ccaaattgctwaataacgtgt

SEQ ID NO: 12828 - DNA, 21 bp, Homo sapiens
gtgagtagaakttgagtatga

SEQ ID NO: 12829 - DNA, 21 bp, Homo sapiens
ccatcttctgygaaatttgtt

SEQ ID NO: 12830 - DNA, 21 bp, Homo sapiens
tgtatgtctgrgcctttgttc

SEQ ID NO: 12831 - DNA, 21 bp, Homo sapiens
gctttccagcyaggttgagga

SEQ ID NO: 12832 - DNA, 21 bp, Homo sapiens
caagattaggratctttgatc

SEQ ID NO: 12833 - DNA, 21 bp, Homo sapiens
tcttagactayttgttgtttc

SEQ ID NO: 12834 - DNA, 21 bp, Homo sapiens
agtctttgccsacaccggctc

SEQ ID NO: 12835 - DNA, 21 bp, Homo sapiens
tcctgtctttrtgctcatctg

SEQ ID NO: 12836 - DNA, 21 bp, Homo sapiens
gtgcattcgcrttgggcagca

SEQ ID NO: 12837 - DNA, 21 bp, Homo sapiens
tggcagctcaractagatcct

SEQ ID NO: 12838 - DNA, 21 bp, Homo sapiens
cggtgagatayaactcaagcc

SEQ ID NO: 12839 - DNA, 21 bp, Homo sapiens
tattttatatmcaagggaatg

SEQ ID NO: 12840 - DNA, 21 bp, Homo sapiens
agaaggaaaaygatgtaagtg

SEQ ID NO: 12841 - DNA, 21 bp, Homo sapiens
tgaatatggtrtagaatgggg

SEQ ID NO: 12842 - DNA, 21 bp, Homo sapiens
taatgttcagycttagaggaa

SEQ ID NO: 12843 - DNA, 21 bp, Homo sapiens
caggtcgtgtragtccacgtg

SEQ ID NO: 12844 - DNA, 21 bp, Homo sapiens
gcatgcaccasatctcagctc

SEQ ID NO: 12845 - DNA, 21 bp, Homo sapiens
gggcaggaaayagttttgcgc

SEQ ID NO: 12846 - DNA, 21 bp, Homo sapiens
agtagcatctyctccttcctt

SEQ ID NO: 12847 - DNA, 21 bp, Homo sapiens
gtcagtgaggktaaggctaca

SEQ ID NO: 12848 - DNA, 21 bp, Homo sapiens
acaagagggtwgtttcagtct

SEQ ID NO: 12849 - DNA, 21 bp, Homo sapiens
caaaagtgaaratttgcataa

SEQ ID NO: 12850 - DNA, 21 bp, Homo sapiens
tgctcgagggrtacgatgcca

SEQ ID NO: 12851 - DNA, 21 bp, Homo sapiens
gtcttctgccycaccctaaaa

SEQ ID NO: 12852 - DNA, 21 bp, Homo sapiens
ccaggaagtcyttctggcttt

SEQ ID NO: 12853 - DNA, 21 bp, Homo sapiens
gaggcaccagygataggccct

SEQ ID NO: 12854 - DNA, 21 bp, Homo sapiens
agaggtgcagrgacagtggag

SEQ ID NO: 12855 - DNA, 21 bp, Homo sapiens
cttgtccccarcctctcccaa

SEQ ID NO: 12856 - DNA, 21 bp, Homo sapiens
tgtaccccatygtattaggaa

SEQ ID NO: 12857 - DNA, 21 bp, Homo sapiens
aaaaatatacrcaatggaagg

SEQ ID NO: 12858 - DNA, 21 bp, Homo sapiens
ttatgtagctmtggagtgcct

SEQ ID NO: 12859 - DNA, 21 bp, Homo sapiens
ttgagaggttkggagacagga

SEQ ID NO: 12860 - DNA, 21 bp, Homo sapiens
tctgtctgtcmtttccagtca

SEQ ID NO: 12861 - DNA, 21 bp, Homo sapiens
tcattcatttwaaaaaacaaa

SEQ ID NO: 12862 - DNA, 21 bp, Homo sapiens
tggacatacartgcttttcct

SEQ ID NO: 12863 - DNA, 21 bp, Homo sapiens
gcttccctgascaccctatcc

SEQ ID NO: 12864 - DNA, 21 bp, Homo sapiens
aatgcagaagsgctcaagctg

SEQ ID NO: 12865 - DNA, 21 bp, Homo sapiens
aaccacacatrgccacaaata

SEQ ID NO: 12866 - DNA, 21 bp, Homo sapiens
taaattctgtyttgttcctga

SEQ ID NO: 12867 - DNA, 21 bp, Homo sapiens
agaaaaggccyacaagaaaga

SEQ ID NO: 12868 - DNA, 21 bp, Homo sapiens
ctcaacagagstaacagtgtt

SEQ ID NO: 12869 - DNA, 21 bp, Homo sapiens
atgcaactctmtaccgaagaa

SEQ ID NO: 12870 - DNA, 21 bp, Homo sapiens
cgcagaacgtracctccacga

SEQ ID NO: 12871 - DNA, 21 bp, Homo sapiens
agtctaattaygatgtgatga

SEQ ID NO: 12872 - DNA, 21 bp, Homo sapiens
actatgaatcyactatgtgta

SEQ ID NO: 12873 - DNA, 21 bp, Homo sapiens
gattgtattgycacaccaggt

SEQ ID NO: 12874 - DNA, 21 bp, Homo sapiens
ctgatctttarttgaataact

SEQ ID NO: 12875 - DNA, 21 bp, Homo sapiens
atgttttctcrctgttttttt

SEQ ID NO: 12876 - DNA, 21 bp, Homo sapiens
ccacagactckgaaatgaaaa

SEQ ID NO: 12877 - DNA, 21 bp, Homo sapiens
tgccaagtgaycccctggaaa

SEQ ID NO: 12878 - DNA, 21 bp, Homo sapiens
aatgacaacaytttctcattt

SEQ ID NO: 12879 - DNA, 21 bp, Homo sapiens
ttatttctttkgcttggggat

SEQ ID NO: 12880 - DNA, 21 bp, Homo sapiens
tcatctttggrtcggagattt

SEQ ID NO: 12881 - DNA, 21 bp, Homo sapiens
ttgtgttagtycattttacac

SEQ ID NO: 12882 - DNA, 21 bp, Homo sapiens
agaaagattargtaaccagac

SEQ ID NO: 12883 - DNA, 21 bp, Homo sapiens
ataagcctcaytttcaccagg

SEQ ID NO: 12884 - DNA, 21 bp, Homo sapiens
gctctctcctyttctgaggca

SEQ ID NO: 12885 - DNA, 21 bp, Homo sapiens
caggcatctgkcactcaggca

SEQ ID NO: 12886 - DNA, 21 bp, Homo sapiens
atacaataaamctctgtgaca

SEQ ID NO: 12887 - DNA, 21 bp, Homo sapiens
aataaaactamggaattgtgt

SEQ ID NO: 12888 - DNA, 21 bp, Homo sapiens
catctagggaratcacagtca

SEQ ID NO: 12889 - DNA, 21 bp, Homo sapiens
ctctgaacaaygacccctgag

SEQ ID NO: 12890 - DNA, 21 bp, Homo sapiens
gtgagattatygggttttcaa

SEQ ID NO: 12891 - DNA, 21 bp, Homo sapiens
ttattttgagwatatactcag

SEQ ID NO: 12892 - DNA, 21 bp, Homo sapiens
gaaagataaamagggagtgag

SEQ ID NO: 12893 - DNA, 21 bp, Homo sapiens
tccttaatatkcatctttgga

SEQ ID NO: 12894 - DNA, 21 bp, Homo sapiens
tatcttttctkgtgagtagag

SEQ ID NO: 12895 - DNA, 21 bp, Homo sapiens
aaacatacttyacccataaag

SEQ ID NO: 12896 - DNA, 21 bp, Homo sapiens
tcctatttggkgaccttaagg

SEQ ID NO: 12897 - DNA, 21 bp, Homo sapiens
aaactccagtkgattcatgtt

SEQ ID NO: 12898 - DNA, 21 bp, Homo sapiens
gaatgaagtgsccacatagaa

SEQ ID NO: 12899 - DNA, 21 bp, Homo sapiens
ctgaaatggcraaacaaatga

SEQ ID NO: 12900 - DNA, 21 bp, Homo sapiens
atagaaaagaragattggtga

SEQ ID NO: 12901 - DNA, 21 bp, Homo sapiens
actcccagatmttccagttcc

SEQ ID NO: 12902 - DNA, 21 bp, Homo sapiens
actgccttttycattgcttca

SEQ ID NO: 12903 - DNA, 21 bp, Homo sapiens
ttggttagcastcgaggcctt

SEQ ID NO: 12904 - DNA, 21 bp, Homo sapiens
cttaaaaattmtctcaacaaa

SEQ ID NO: 12905 - DNA, 21 bp, Homo sapiens
caatttcccaractttttggt

SEQ ID NO: 12906 - DNA, 21 bp, Homo sapiens
tataaaagggycttgaggcca

SEQ ID NO: 12907 - DNA, 21 bp, Homo sapiens
gctgtttctaytgctatatcc

SEQ ID NO: 12908 - DNA, 21 bp, Homo sapiens
tgtttggaggsagtttctagc

SEQ ID NO: 12909 - DNA, 21 bp, Homo sapiens
accagcatgartgatctcaga

SEQ ID NO: 12910 - DNA, 21 bp, Homo sapiens
ttgtattcccmatgtgtccag

SEQ ID NO: 12911 - DNA, 21 bp, Homo sapiens
ttcagtccagygtctggaaca

SEQ ID NO: 12912 - DNA, 21 bp, Homo sapiens
gcatgcctcaytggactctat

SEQ ID NO: 12913 - DNA, 21 bp, Homo sapiens
gtcatctgggraacttggtaa

SEQ ID NO: 12914 - DNA, 21 bp, Homo sapiens
ctccttgaggrcagagtctgg

SEQ ID NO: 12915 - DNA, 21 bp, Homo sapiens
tgaccatttgytctgtgtatt

SEQ ID NO: 12916 - DNA, 21 bp, Homo sapiens
agctgagaaargtttacaaga

SEQ ID NO: 12917 - DNA, 21 bp, Homo sapiens
aaatatttgarattcaattca

SEQ ID NO: 12918 - DNA, 21 bp, Homo sapiens
ttatccttttyctcctgtatt

SEQ ID NO: 12919 - DNA, 21 bp, Homo sapiens
tggatgaacasttacttagtg

SEQ ID NO: 12920 - DNA, 21 bp, Homo sapiens
attcggatatygttattgtgt

SEQ ID NO: 12921 - DNA, 21 bp, Homo sapiens
aaaaataataraaacataaga

SEQ ID NO: 12922 - DNA, 21 bp, Homo sapiens
atttcaatatrtaaatttaca

SEQ ID NO: 12923 - DNA, 21 bp, Homo sapiens
ttgagaaagarccaatttgga

SEQ ID NO: 12924 - DNA, 21 bp, Homo sapiens
tatcagtcagsgttcgaccag

SEQ ID NO: 12925 - DNA, 21 bp, Homo sapiens
ctatgggagayccatccgttg

SEQ ID NO: 12926 - DNA, 21 bp, Homo sapiens
ctcatccctgycaccatggcc

SEQ ID NO: 12927 - DNA, 21 bp, Homo sapiens
tgtgggaattktaagtgttat

SEQ ID NO: 12928 - DNA, 21 bp, Homo sapiens
gggagttgttrgtattggtat

SEQ ID NO: 12929 - DNA, 21 bp, Homo sapiens
ctgtaaatatygaagaacatg

SEQ ID NO: 12930 - DNA, 21 bp, Homo sapiens
aaccaaaaatraagtaacaag

SEQ ID NO: 12931 - DNA, 21 bp, Homo sapiens
actacacctgrcagagcttgc

SEQ ID NO: 12932 - DNA, 21 bp, Homo sapiens
ctttgtatatractattattt

SEQ ID NO: 12933 - DNA, 21 bp, Homo sapiens
gggttgcaccrtccactttgt

SEQ ID NO: 12934 - DNA, 21 bp, Homo sapiens
ataacatcaartatggtccag

SEQ ID NO: 12935 - DNA, 21 bp, Homo sapiens
tgaggtatgcrtaagtttata

SEQ ID NO: 12936 - DNA, 21 bp, Homo sapiens
gagttctccastgaaattgaa

SEQ ID NO: 12937 - DNA, 21 bp, Homo sapiens
ggtcaagtgartttagtttaa

SEQ ID NO: 12938 - DNA, 21 bp, Homo sapiens
tgttaagcctraattgaagaa

SEQ ID NO: 12939 - DNA, 21 bp, Homo sapiens
gatactatttsttgtctcaat

SEQ ID NO: 12940 - DNA, 21 bp, Homo sapiens
ttttagaagamatgacagaca

SEQ ID NO: 12941 - DNA, 21 bp, Homo sapiens
aatgctgtcarcaacaaagca

SEQ ID NO: 12942 - DNA, 21 bp, Homo sapiens
atcacttgggragcttcataa

SEQ ID NO: 12943 - DNA, 21 bp, Homo sapiens
aaatatctctrtgtgcaatga

SEQ ID NO: 12944 - DNA, 21 bp, Homo sapiens
aattaaaattrtagcatgtca

SEQ ID NO: 12945 - DNA, 21 bp, Homo sapiens
ggaaacctagytgaatctatt

SEQ ID NO: 12946 - DNA, 21 bp, Homo sapiens
tattttcttcmaaggcttaca

SEQ ID NO: 12947 - DNA, 21 bp, Homo sapiens
atttactgctrtattcttttc

SEQ ID NO: 12948 - DNA, 21 bp, Homo sapiens
taaaataaaayttaaaaaatc

SEQ ID NO: 12949 - DNA, 21 bp, Homo sapiens
atgctcatgtsctaatcatca

SEQ ID NO: 12950 - DNA, 21 bp, Homo sapiens
acttaggatcracttttcagg

SEQ ID NO: 12951 - DNA, 21 bp, Homo sapiens
atccttttttrtgtatatttg

SEQ ID NO: 12952 - DNA, 21 bp, Homo sapiens
aactaatccayttcattgagc

SEQ ID NO: 12953 - DNA, 21 bp, Homo sapiens
aaattaaagarcaggttgtaa

SEQ ID NO: 12954 - DNA, 21 bp, Homo sapiens
atgtgattcakttgctgttgc

SEQ ID NO: 12955 - DNA, 21 bp, Homo sapiens
tcattggaaayggagtatccc

SEQ ID NO: 12956 - DNA, 21 bp, Homo sapiens
tacactacgcmtgagcaactg

SEQ ID NO: 12957 - DNA, 21 bp, Homo sapiens
tggagaaaaaraattgtatta

SEQ ID NO: 12958 - DNA, 21 bp, Homo sapiens
gatgcacattkgaaacttgtt

SEQ ID NO: 12959 - DNA, 21 bp, Homo sapiens
atttcccaagrtgcatgttct

SEQ ID NO: 12960 - DNA, 21 bp, Homo sapiens
tcctcacagargaatttctgg

SEQ ID NO: 12961 - DNA, 21 bp, Homo sapiens
gagagtgcagrggtgatgcct

SEQ ID NO: 12962 - DNA, 21 bp, Homo sapiens
aatacacaacrttttatcata

SEQ ID NO: 12963 - DNA, 21 bp, Homo sapiens
tgccagagccktcccagcata

SEQ ID NO: 12964 - DNA, 21 bp, Homo sapiens
tatccttttcygtttcatgga

SEQ ID NO: 12965 - DNA, 21 bp, Homo sapiens
tgatcttaacrtacacatctt

SEQ ID NO: 12966 - DNA, 21 bp, Homo sapiens
aattctgaaaytttgtcccag

SEQ ID NO: 12967 - DNA, 21 bp, Homo sapiens
ctaaccagtarggtggaccgc

SEQ ID NO: 12968 - DNA, 21 bp, Homo sapiens
aaacatcattytatttcgtat

SEQ ID NO: 12969 - DNA, 21 bp, Homo sapiens
atagaaaactrcttttctccc

SEQ ID NO: 12970 - DNA, 21 bp, Homo sapiens
tcatttgtaawaatttccttc

SEQ ID NO: 12971 - DNA, 21 bp, Homo sapiens
tagaatcactkagcatatgat

SEQ ID NO: 12972 - DNA, 21 bp, Homo sapiens
atttatacaayagaccatcct

SEQ ID NO: 12973 - DNA, 21 bp, Homo sapiens
ttattttctaygatttgagct

SEQ ID NO: 12974 - DNA, 21 bp, Homo sapiens
cttaaatgtayttaccttatc

SEQ ID NO: 12975 - DNA, 21 bp, Homo sapiens
catgggttatsataggtaatt

SEQ ID NO: 12976 - DNA, 21 bp, Homo sapiens
acatattgatracatacacta

SEQ ID NO: 12977 - DNA, 21 bp, Homo sapiens
tgacttaaacrgcagggctta

SEQ ID NO: 12978 - DNA, 21 bp, Homo sapiens
actcatcactsctggggggtc

SEQ ID NO: 12979 - DNA, 21 bp, Homo sapiens
tcattattgayatgagacaag

SEQ ID NO: 12980 - DNA, 21 bp, Homo sapiens
aattaattggrtgtcctctct

SEQ ID NO: 12981 - DNA, 21 bp, Homo sapiens
tctggtaagamtggaaatcac

SEQ ID NO: 12982 - DNA, 21 bp, Homo sapiens
tttgagaaaartataaaccaa

SEQ ID NO: 12983 - DNA, 21 bp, Homo sapiens
ttgaaaagcartgtcatgtaa

SEQ ID NO: 12984 - DNA, 21 bp, Homo sapiens
ttgtataatgmttcaagtcca

SEQ ID NO: 12985 - DNA, 21 bp, Homo sapiens
caagcaaaatrtaatgtgcca

SEQ ID NO: 12986 - DNA, 21 bp, Homo sapiens
ttttatcttartatctgcaca

SEQ ID NO: 12987 - DNA, 21 bp, Homo sapiens
ttgtggcagtrcttagaggga

SEQ ID NO: 12988 - DNA, 21 bp, Homo sapiens
tggagtgtgaytgaaagaaaa

SEQ ID NO: 12989 - DNA, 21 bp, Homo sapiens
tgattgcagtycttaatctag

SEQ ID NO: 12990 - DNA, 21 bp, Homo sapiens
tttatgggcaytttaataaca

SEQ ID NO: 12991 - DNA, 21 bp, Homo sapiens
tcaaaaattgkgaatagaaaa

SEQ ID NO: 12992 - DNA, 21 bp, Homo sapiens
ggtgggccagktcttccttgc

SEQ ID NO: 12993 - DNA, 21 bp, Homo sapiens
gggcaaaaaawaagtatatca

SEQ ID NO: 12994 - DNA, 21 bp, Homo sapiens
ttttaagcacyaaaggaaggg

SEQ ID NO: 12995 - DNA, 21 bp, Homo sapiens
tttgcccccayactttctagc

SEQ ID NO: 12996 - DNA, 21 bp, Homo sapiens
tccgatagaascacaatataa

SEQ ID NO: 12997 - DNA, 21 bp, Homo sapiens
aatggattaawccacatatac

SEQ ID NO: 12998 - DNA, 21 bp, Homo sapiens
attatatacaratttcagggt

SEQ ID NO: 12999 - DNA, 21 bp, Homo sapiens
gtgacttatasaagacactgg

SEQ ID NO: 13000 - DNA, 21 bp, Homo sapiens
gcttttcattktccccacatc

SEQ ID NO: 13001 - DNA, 21 bp, Homo sapiens
ggccagtgagrgaatctgtga

SEQ ID NO: 13002 - DNA, 21 bp, Homo sapiens
accttctactkatttaccttt

SEQ ID NO: 13003 - DNA, 21 bp, Homo sapiens
tcaaaacttaytgtttttgta

SEQ ID NO: 13004 - DNA, 21 bp, Homo sapiens
ttcaattattrgtttctcaaa

SEQ ID NO: 13005 - DNA, 21 bp, Homo sapiens
tatctttcccragcccattta

SEQ ID NO: 13006 - DNA, 21 bp, Homo sapiens
ctctcagtcargtatgagtga

SEQ ID NO: 13007 - DNA, 21 bp, Homo sapiens
ctacacatttrataagctgac

SEQ ID NO: 13008 - DNA, 21 bp, Homo sapiens
tgtcctgcctrgggtaacaat

SEQ ID NO: 13009 - DNA, 21 bp, Homo sapiens
gaggtcaagcraggtgtctct

SEQ ID NO: 13010 - DNA, 21 bp, Homo sapiens
gattagaacaygagaaaatgt

SEQ ID NO: 13011 - DNA, 21 bp, Homo sapiens
tgacatctgtktactatttct

SEQ ID NO: 13012 - DNA, 21 bp, Homo sapiens
ttatgtgtgtrtgtgtgtgtg

SEQ ID NO: 13013 - DNA, 21 bp, Homo sapiens
gataattctcrtgctttcctg

SEQ ID NO: 13014 - DNA, 21 bp, Homo sapiens
ttaatgagagytgtcactagt

SEQ ID NO: 13015 - DNA, 21 bp, Homo sapiens
aaaaattgttyttctgcaata

SEQ ID NO: 13016 - DNA, 21 bp, Homo sapiens
tacatgttacstcacagaacc

SEQ ID NO: 13017 - DNA, 21 bp, Homo sapiens
aatttcatgcwggaaaatatt

SEQ ID NO: 13018 - DNA, 21 bp, Homo sapiens
tcaatatactrtatctgactg

SEQ ID NO: 13019 - DNA, 21 bp, Homo sapiens
tgctgtgatamttcatgttcg

SEQ ID NO: 13020 - DNA, 21 bp, Homo sapiens
ggcttcctcawcatttcctaa

SEQ ID NO: 13021 - DNA, 21 bp, Homo sapiens
aaagtagactrtcccaggtaa

SEQ ID NO: 13022 - DNA, 21 bp, Homo sapiens
cactttcactycaagagtggt

SEQ ID NO: 13023 - DNA, 21 bp, Homo sapiens
caattattaayttttctccaa

SEQ ID NO: 13024 - DNA, 21 bp, Homo sapiens
gaccaattctsctggttttct

SEQ ID NO: 13025 - DNA, 21 bp, Homo sapiens
tttctataaarccatactttt

SEQ ID NO: 13026 - DNA, 21 bp, Homo sapiens
gattcagtttrctattattag

SEQ ID NO: 13027 - DNA, 21 bp, Homo sapiens
accctcccctytcctgagcga

SEQ ID NO: 13028 - DNA, 21 bp, Homo sapiens
ggcagaggagrtgatatcaca

SEQ ID NO: 13029 - DNA, 21 bp, Homo sapiens
atatgaaaccygaagcaggtt

SEQ ID NO: 13030 - DNA, 21 bp, Homo sapiens
ataaatctctygtttcttacg

SEQ ID NO: 13031 - DNA, 21 bp, Homo sapiens
acaaagtctgytgggcccgca

SEQ ID NO: 13032 - DNA, 21 bp, Homo sapiens
aaaacaccctstattaaaatg

SEQ ID NO: 13033 - DNA, 21 bp, Homo sapiens
taatacatacmaaaaaaggcc

SEQ ID NO: 13034 - DNA, 21 bp, Homo sapiens
cataagcaccracctttggtg

SEQ ID NO: 13035 - DNA, 21 bp, Homo sapiens
aaaatgatgtstttagttggt

SEQ ID NO: 13036 - DNA, 21 bp, Homo sapiens
aaataacataygtaaaggcac

SEQ ID NO: 13037 - DNA, 21 bp, Homo sapiens
aaccaactaawaagttgtata

SEQ ID NO: 13038 - DNA, 21 bp, Homo sapiens
tgccagctacstacaggagtc

SEQ ID NO: 13039 - DNA, 21 bp, Homo sapiens
gtatttcctakcttcctatct

SEQ ID NO: 13040 - DNA, 21 bp, Homo sapiens
ctcttaagtcrgtaaaatgtc

SEQ ID NO: 13041 - DNA, 21 bp, Homo sapiens
ttactcttaawccataaatat

SEQ ID NO: 13042 - DNA, 21 bp, Homo sapiens
tgcactgggartgagagaaat

SEQ ID NO: 13043 - DNA, 21 bp, Homo sapiens
cttttgtagaytctgctgata

SEQ ID NO: 13044 - DNA, 21 bp, Homo sapiens
ctacaacctcrtgtttactct

SEQ ID NO: 13045 - DNA, 21 bp, Homo sapiens
tacgccccacwatgcagtgat

SEQ ID NO: 13046 - DNA, 21 bp, Homo sapiens
gtgcactacartgtctttgtg

SEQ ID NO: 13047 - DNA, 21 bp, Homo sapiens
ttaccaaagckgccacagaac

SEQ ID NO: 13048 - DNA, 21 bp, Homo sapiens
aacagcatgtwttggcactag

SEQ ID NO: 13049 - DNA, 21 bp, Homo sapiens
gcaaacaccasagatagccag

SEQ ID NO: 13050 - DNA, 21 bp, Homo sapiens
cctgctaaccwcttttctact

SEQ ID NO: 13051 - DNA, 21 bp, Homo sapiens
attttgtaatyctcatatatc

SEQ ID NO: 13052 - DNA, 21 bp, Homo sapiens
aagattcactwtgaagaccac

SEQ ID NO: 13053 - DNA, 21 bp, Homo sapiens
gggtcctgctrcatgtaaaaa

SEQ ID NO: 13054 - DNA, 21 bp, Homo sapiens
gctgcagcacyagattaaagc

SEQ ID NO: 13055 - DNA, 21 bp, Homo sapiens
ttctaatacasttagttttta

SEQ ID NO: 13056 - DNA, 21 bp, Homo sapiens
tgtgacaatgycattaattaa

SEQ ID NO: 13057 - DNA, 21 bp, Homo sapiens
aaatagagacstgctgactgt

SEQ ID NO: 13058 - DNA, 21 bp, Homo sapiens
gatacattgawcaaaacactg

SEQ ID NO: 13059 - DNA, 21 bp, Homo sapiens
tgtatattgcrgaagaagttg

SEQ ID NO: 13060 - DNA, 21 bp, Homo sapiens
tgttggatacrtatttttgta

SEQ ID NO: 13061 - DNA, 21 bp, Homo sapiens
tcatatttacsatagatagta

SEQ ID NO: 13062 - DNA, 21 bp, Homo sapiens
catagcataawaaatttagtg

SEQ ID NO: 13063 - DNA, 21 bp, Homo sapiens
tttgattttgraatagcccag

SEQ ID NO: 13064 - DNA, 21 bp, Homo sapiens
ggaaagtaaasaagttcagca

SEQ ID NO: 13065 - DNA, 21 bp, Homo sapiens
ttttctttttragccttcacc

SEQ ID NO: 13066 - DNA, 21 bp, Homo sapiens
gctttcacagrtgaatgctgg

SEQ ID NO: 13067 - DNA, 21 bp, Homo sapiens
tcaaattgttsaacaataaat

SEQ ID NO: 13068 - DNA, 21 bp, Homo sapiens
gtgaaactatyatcatgtacc

SEQ ID NO: 13069 - DNA, 21 bp, Homo sapiens
tggaaaggggwacttttgagg

SEQ ID NO: 13070 - DNA, 21 bp, Homo sapiens
tacataattamccctcaaagg

SEQ ID NO: 13071 - DNA, 21 bp, Homo sapiens
gaaccgttgarcactattagt

SEQ ID NO: 13072 - DNA, 21 bp, Homo sapiens
tatcatagatwtcagattgtt

SEQ ID NO: 13073 - DNA, 21 bp, Homo sapiens
tggctattaarcatatgacaa

SEQ ID NO: 13074 - DNA, 21 bp, Homo sapiens
ttctccaaatwgcatttttta

SEQ ID NO: 13075 - DNA, 21 bp, Homo sapiens
taccacttagyatttatcata

SEQ ID NO: 13076 - DNA, 21 bp, Homo sapiens
agggctactcsataaaataat

SEQ ID NO: 13077 - DNA, 21 bp, Homo sapiens
aacaatcacarttttgctgag

SEQ ID NO: 13078 - DNA, 21 bp, Homo sapiens
tgaaataaatrttttactgga

SEQ ID NO: 13079 - DNA, 21 bp, Homo sapiens
ttgttccactscggcaggtat

SEQ ID NO: 13080 - DNA, 21 bp, Homo sapiens
tttgtaaaaakttattgaact

SEQ ID NO: 13081 - DNA, 21 bp, Homo sapiens
agctaaggctkaaatatacca

SEQ ID NO: 13082 - DNA, 21 bp, Homo sapiens
gttaatttatktaataacttt

SEQ ID NO: 13083 - DNA, 21 bp, Homo sapiens
gcatggccccrtgggcaaaag

SEQ ID NO: 13084 - DNA, 21 bp, Homo sapiens
agaaataatayggttttgggc

SEQ ID NO: 13085 - DNA, 21 bp, Homo sapiens
aaataggtatrtgtattaata

SEQ ID NO: 13086 - DNA, 21 bp, Homo sapiens
tagacattttmtttatacttc

SEQ ID NO: 13087 - DNA, 21 bp, Homo sapiens
ctacttcataygaggaactgt

SEQ ID NO: 13088 - DNA, 21 bp, Homo sapiens
aaggacctgayatcagtgtga

SEQ ID NO: 13089 - DNA, 21 bp, Homo sapiens
atatgtgccartatggaatac

SEQ ID NO: 13090 - DNA, 21 bp, Homo sapiens
gggcaaagccrgagttgtata

SEQ ID NO: 13091 - DNA, 21 bp, Homo sapiens
attggacacartcaaacaaac

SEQ ID NO: 13092 - DNA, 21 bp, Homo sapiens
aatgtcttttrcagtaagatg

SEQ ID NO: 13093 - DNA, 21 bp, Homo sapiens
gaagaaaggtrgttgggctaa

SEQ ID NO: 13094 - DNA, 21 bp, Homo sapiens
ttgtacactarcttgtatcct

SEQ ID NO: 13095 - DNA, 21 bp, Homo sapiens
aattttgaaakaatttctgaa

SEQ ID NO: 13096 - DNA, 21 bp, Homo sapiens
cttcacacgcraaggaatctc

SEQ ID NO: 13097 - DNA, 21 bp, Homo sapiens
acagaagacartttacaaaat

SEQ ID NO: 13098 - DNA, 21 bp, Homo sapiens
ttaaatctackatctccaata

SEQ ID NO: 13099 - DNA, 21 bp, Homo sapiens
aattcccttgsgatatttgca

SEQ ID NO: 13100 - DNA, 21 bp, Homo sapiens
cataaaaatcrtattcttaag

SEQ ID NO: 13101 - DNA, 21 bp, Homo sapiens
aactgctcatygttttcttac

SEQ ID NO: 13102 - DNA, 21 bp, Homo sapiens
aaactttttcsaagtttactt

SEQ ID NO: 13103 - DNA, 21 bp, Homo sapiens
aaattcatttrtaataaataa

SEQ ID NO: 13104 - DNA, 21 bp, Homo sapiens
tcaaaactgayaaaattaagc

SEQ ID NO: 13105 - DNA, 21 bp, Homo sapiens
aatttggtatwtgacaaatgt

SEQ ID NO: 13106 - DNA, 21 bp, Homo sapiens
tctactgggcratgaatttaa

SEQ ID NO: 13107 - DNA, 21 bp, Homo sapiens
gagacataacrtaatattgtg

SEQ ID NO: 13108 - DNA, 21 bp, Homo sapiens
tagagaaattrtctgcattag

SEQ ID NO: 13109 - DNA, 21 bp, Homo sapiens
agctgtatatytatttaggct

SEQ ID NO: 13110 - DNA, 21 bp, Homo sapiens
ataggaatacytaaatcaagc

SEQ ID NO: 13111 - DNA, 21 bp, Homo sapiens
gatagttgtascatgcagtat

SEQ ID NO: 13112 - DNA, 21 bp, Homo sapiens
tctatgagagwagaaaaatac

SEQ ID NO: 13113 - DNA, 21 bp, Homo sapiens
gtttaacttgwtaaagtacta

SEQ ID NO: 13114 - DNA, 21 bp, Homo sapiens
gtgtgtttatrtttattcaat

SEQ ID NO: 13115 - DNA, 21 bp, Homo sapiens
cctgcttttcrgtcttctgtg

SEQ ID NO: 13116 - DNA, 21 bp, Homo sapiens
ctactctcaayactttattgt

SEQ ID NO: 13117 - DNA, 21 bp, Homo sapiens
gcttctcaaaygctttatggt

SEQ ID NO: 13118 - DNA, 21 bp, Homo sapiens
attttaacacmacagctttac

SEQ ID NO: 13119 - DNA, 21 bp, Homo sapiens
aactgcatctyacaaattttg

SEQ ID NO: 13120 - DNA, 21 bp, Homo sapiens
ctgtctggaakaatggtccac

SEQ ID NO: 13121 - DNA, 21 bp, Homo sapiens
gtggaaaggaraaaagactag

SEQ ID NO: 13122 - DNA, 21 bp, Homo sapiens
ctgtaacaccracttcaggcg

SEQ ID NO: 13123 - DNA, 21 bp, Homo sapiens
aaaaaaaatcmtaacatttat

SEQ ID NO: 13124 - DNA, 21 bp, Homo sapiens
acattcttctktctagatttt

SEQ ID NO: 13125 - DNA, 21 bp, Homo sapiens
gatctcttcayagaaacccaa

SEQ ID NO: 13126 - DNA, 21 bp, Homo sapiens
agcagcttgcrttcttattat

SEQ ID NO: 13127 - DNA, 21 bp, Homo sapiens
caggtaccacyattgtgcttg

SEQ ID NO: 13128 - DNA, 21 bp, Homo sapiens
ttctcataatkctgtaggcag

SEQ ID NO: 13129 - DNA, 21 bp, Homo sapiens
ggctgaaatayagatttatgt

SEQ ID NO: 13130 - DNA, 21 bp, Homo sapiens
taaaatgtgawgttttgccat

SEQ ID NO: 13131 - DNA, 21 bp, Homo sapiens
aattattgaamatgaataaaa

SEQ ID NO: 13132 - DNA, 21 bp, Homo sapiens
acaccccaaartaatgcttaa

SEQ ID NO: 13133 - DNA, 21 bp, Homo sapiens
agaaattcacscttctcatca

SEQ ID NO: 13134 - DNA, 21 bp, Homo sapiens
tctcctctatsttctgcattt

SEQ ID NO: 13135 - DNA, 21 bp, Homo sapiens
aacatatgtakctacaacata

SEQ ID NO: 13136 - DNA, 21 bp, Homo sapiens
tgacttgtaastaaaattaag

SEQ ID NO: 13137 - DNA, 21 bp, Homo sapiens
acaaaagacartatcaacaat

SEQ ID NO: 13138 - DNA, 21 bp, Homo sapiens
aaagcattatracaagaaaac

SEQ ID NO: 13139 - DNA, 21 bp, Homo sapiens
ctaaagccctrtttgagcagt

SEQ ID NO: 13140 - DNA, 21 bp, Homo sapiens
ttatcaaatawcaatgactta

SEQ ID NO: 13141 - DNA, 21 bp, Homo sapiens
aggcaccacaycttactgaag

SEQ ID NO: 13142 - DNA, 21 bp, Homo sapiens
cagctccttgmagtaatgtat

SEQ ID NO: 13143 - DNA, 21 bp, Homo sapiens
ccactcttcckttggggtgag

SEQ ID NO: 13144 - DNA, 21 bp, Homo sapiens
ataaagacttrgtaagtggca

SEQ ID NO: 13145 - DNA, 21 bp, Homo sapiens
ctttctttcartacttaatca

SEQ ID NO: 13146 - DNA, 21 bp, Homo sapiens
tgtctcaatarcctatcatag

SEQ ID NO: 13147 - DNA, 21 bp, Homo sapiens
ctccttactakctcctctatt

SEQ ID NO: 13148 - DNA, 21 bp, Homo sapiens
ttattcctttwtaacttttca

SEQ ID NO: 13149 - DNA, 21 bp, Homo sapiens
atttttttaayagagagcatt

SEQ ID NO: 13150 - DNA, 21 bp, Homo sapiens
aatgttaccaratcatagcag

SEQ ID NO: 13151 - DNA, 21 bp, Homo sapiens
gatatttctgmgtttgcaaat

SEQ ID NO: 13152 - DNA, 21 bp, Homo sapiens
cagtatctagyttttttgcat

SEQ ID NO: 13153 - DNA, 21 bp, Homo sapiens
ttgctagctawgcctcctctt

SEQ ID NO: 13154 - DNA, 21 bp, Homo sapiens
tctaaaaccaraatgacaacc

SEQ ID NO: 13155 - DNA, 21 bp, Homo sapiens
tgtgagcctcwtgactgccta

SEQ ID NO: 13156 - DNA, 21 bp, Homo sapiens
tattaataccrctaattctca

SEQ ID NO: 13157 - DNA, 21 bp, Homo sapiens
gtgctacttcrtctgatatga

SEQ ID NO: 13158 - DNA, 21 bp, Homo sapiens
gatttcacttkccattgcaac

SEQ ID NO: 13159 - DNA, 21 bp, Homo sapiens
gttttgaaatktacatgtcca

SEQ ID NO: 13160 - DNA, 21 bp, Homo sapiens
cagccaccccsccagcttggg

SEQ ID NO: 13161 - DNA, 21 bp, Homo sapiens
ccctgacatayacgaggataa

SEQ ID NO: 13162 - DNA, 21 bp, Homo sapiens
gaaaaggaagrtgtgtatggc

SEQ ID NO: 13163 - DNA, 21 bp, Homo sapiens
tgggtttgccyaccttgtaac

SEQ ID NO: 13164 - DNA, 21 bp, Homo sapiens
ctagctcaaarctttctggaa

SEQ ID NO: 13165 - DNA, 21 bp, Homo sapiens
attacttacayttgccttgta

SEQ ID NO: 13166 - DNA, 21 bp, Homo sapiens
aatcaagaaamttggctacat

SEQ ID NO: 13167 - DNA, 21 bp, Homo sapiens
agttaaaatayctacatgaga

SEQ ID NO: 13168 - DNA, 21 bp, Homo sapiens
ctaatgttttsagctttttct

SEQ ID NO: 13169 - DNA, 21 bp, Homo sapiens
ctaaaaatcartaggagaaaa

SEQ ID NO: 13170 - DNA, 21 bp, Homo sapiens
tttaaggggaraaaaaagaag

SEQ ID NO: 13171 - DNA, 21 bp, Homo sapiens
tggagaaagaraactatatat

SEQ ID NO: 13172 - DNA, 21 bp, Homo sapiens
agtactctttstattctagtt

SEQ ID NO: 13173 - DNA, 21 bp, Homo sapiens
taggcatcgcrgttttgaggg

SEQ ID NO: 13174 - DNA, 21 bp, Homo sapiens
agattctaagrccagaacatc

SEQ ID NO: 13175 - DNA, 21 bp, Homo sapiens
gcttccttccyggaggagcct

SEQ ID NO: 13176 - DNA, 21 bp, Homo sapiens
catatgaaaastataaatgcg

SEQ ID NO: 13177 - DNA, 21 bp, Homo sapiens
tataatttgtycagcttacct

SEQ ID NO: 13178 - DNA, 21 bp, Homo sapiens
agttcctaccrgtaatcatca

SEQ ID NO: 13179 - DNA, 21 bp, Homo sapiens
ataccataacygcagtgaatg

SEQ ID NO: 13180 - DNA, 21 bp, Homo sapiens
attattctagmgttctaaagt

SEQ ID NO: 13181 - DNA, 21 bp, Homo sapiens
tccagtgtatwcgtagtctgt

SEQ ID NO: 13182 - DNA, 21 bp, Homo sapiens
acagggagatrataggtacag

SEQ ID NO: 13183 - DNA, 21 bp, Homo sapiens
ctaatttgcarttcacaggat

SEQ ID NO: 13184 - DNA, 21 bp, Homo sapiens
cccttttcggkgtctttgaca

SEQ ID NO: 13185 - DNA, 21 bp, Homo sapiens
taacaaacccrttggatctgc

SEQ ID NO: 13186 - DNA, 21 bp, Homo sapiens
ggctccatcarggtcagaaaa

SEQ ID NO: 13187 - DNA, 21 bp, Homo sapiens
tgggcgatagygcaggtttat

SEQ ID NO: 13188 - DNA, 21 bp, Homo sapiens
atcctccaagrttgggggctg

SEQ ID NO: 13189 - DNA, 21 bp, Homo sapiens
cctttgaagaratggaaaact

SEQ ID NO: 13190 - DNA, 21 bp, Homo sapiens
ggataacaaargtaagtcatt

SEQ ID NO: 13191 - DNA, 21 bp, Homo sapiens
gaaatgttttkgtcagtagct

SEQ ID NO: 13192 - DNA, 21 bp, Homo sapiens
tgaaacctttkctcactggga

SEQ ID NO: 13193 - DNA, 21 bp, Homo sapiens
taacccaaccrtttattttac

SEQ ID NO: 13194 - DNA, 21 bp, Homo sapiens
atgaatccctratgaaatctt

SEQ ID NO: 13195 - DNA, 21 bp, Homo sapiens
acatagaagcrctgtttattc

SEQ ID NO: 13196 - DNA, 21 bp, Homo sapiens
tctgggtcctrtcatatgact

SEQ ID NO: 13197 - DNA, 21 bp, Homo sapiens
ttacatatgcrtgattttttt

SEQ ID NO: 13198 - DNA, 21 bp, Homo sapiens
ggtaaacaaartccttctacc

SEQ ID NO: 13199 - DNA, 21 bp, Homo sapiens
cttgaatgggytatgtccaga

SEQ ID NO: 13200 - DNA, 21 bp, Homo sapiens
ttaaggcctgmaaagtctacc

SEQ ID NO: 13201 - DNA, 21 bp, Homo sapiens
tgcttcgaccrtttttaacct

SEQ ID NO: 13202 - DNA, 21 bp, Homo sapiens
tatactccaascaccctttaa

SEQ ID NO: 13203 - DNA, 21 bp, Homo sapiens
ggtgtgactgyagcaaagggt

SEQ ID NO: 13204 - DNA, 21 bp, Homo sapiens
tgagacaccamctgccccatc

SEQ ID NO: 13205 - DNA, 21 bp, Homo sapiens
atagaaaaagrataatgactt

SEQ ID NO: 13206 - DNA, 21 bp, Homo sapiens
aaagatgtaargcagtaatta

SEQ ID NO: 13207 - DNA, 21 bp, Homo sapiens
aaaagaaaatrtaaactaaaa

SEQ ID NO: 13208 - DNA, 21 bp, Homo sapiens
taataaatgayggacctgctt

SEQ ID NO: 13209 - DNA, 21 bp, Homo sapiens
tggatcagtcmgcagatgaat

SEQ ID NO: 13210 - DNA, 21 bp, Homo sapiens
atttacagggycataagtgga

SEQ ID NO: 13211 - DNA, 21 bp, Homo sapiens
agacctccaargaaaattagc

SEQ ID NO: 13212 - DNA, 21 bp, Homo sapiens
ctgtttctagstggttcaact

SEQ ID NO: 13213 - DNA, 21 bp, Homo sapiens
gaaattttatyccaacaggga

SEQ ID NO: 13214 - DNA, 21 bp, Homo sapiens
gtttcactgcratattaatgt

SEQ ID NO: 13215 - DNA, 21 bp, Homo sapiens
attcaccatayggcacagcaa

SEQ ID NO: 13216 - DNA, 21 bp, Homo sapiens
aacacgtaaartgatgtcata

SEQ ID NO: 13217 - DNA, 21 bp, Homo sapiens
tatacagaaayccaaattagg

SEQ ID NO: 13218 - DNA, 21 bp, Homo sapiens
gacaaatgaaratgaagcagc

SEQ ID NO: 13219 - DNA, 21 bp, Homo sapiens
atgacaaaatrcaactgtgaa

SEQ ID NO: 13220 - DNA, 21 bp, Homo sapiens
ctctccctgcrcggtggagaa

SEQ ID NO: 13221 - DNA, 21 bp, Homo sapiens
tcaaaaagccyccacaaggaa

SEQ ID NO: 13222 - DNA, 21 bp, Homo sapiens
ctgcaggtgtkcctcaagacc

SEQ ID NO: 13223 - DNA, 21 bp, Homo sapiens
acttttaaaakaaataatgag

SEQ ID NO: 13224 - DNA, 21 bp, Homo sapiens
attatacttcmtacaagcata

SEQ ID NO: 13225 - DNA, 21 bp, Homo sapiens
cctaaattaaygtccaatgtg

SEQ ID NO: 13226 - DNA, 21 bp, Homo sapiens
ctttcaacacwttgttccctc

SEQ ID NO: 13227 - DNA, 21 bp, Homo sapiens
atgctcgtacrtaaagaggta

SEQ ID NO: 13228 - DNA, 21 bp, Homo sapiens
tctaaagccartcatcaacat

SEQ ID NO: 13229 - DNA, 21 bp, Homo sapiens
aagaaaatatmaagatgactc

SEQ ID NO: 13230 - DNA, 21 bp, Homo sapiens
gaaactgagaygaccaggatg

SEQ ID NO: 13231 - DNA, 21 bp, Homo sapiens
gctcaaatccktagagatgat

SEQ ID NO: 13232 - DNA, 21 bp, Homo sapiens
taatggctgcrcaataaagag

SEQ ID NO: 13233 - DNA, 21 bp, Homo sapiens
ccaagtgtctrtattctgtgt

SEQ ID NO: 13234 - DNA, 21 bp, Homo sapiens
catcctgtgtyactgtctaag

SEQ ID NO: 13235 - DNA, 21 bp, Homo sapiens
ctaggttctgragaatattcc

SEQ ID NO: 13236 - DNA, 21 bp, Homo sapiens
aaagttttaawataatgatgc

SEQ ID NO: 13237 - DNA, 21 bp, Homo sapiens
ctaatagaatrtaagctcctt

SEQ ID NO: 13238 - DNA, 21 bp, Homo sapiens
cataaaatgtsaaattgccag

SEQ ID NO: 13239 - DNA, 21 bp, Homo sapiens
atttttagttyactcattggt

SEQ ID NO: 13240 - DNA, 21 bp, Homo sapiens
ggggtagataygatacccagg

SEQ ID NO: 13241 - DNA, 21 bp, Homo sapiens
cccaaggatayagcaggactg

SEQ ID NO: 13242 - DNA, 21 bp, Homo sapiens
cattgtcttcytagagggtgg

SEQ ID NO: 13243 - DNA, 21 bp, Homo sapiens
gttcatcctgygaacagctgg

SEQ ID NO: 13244 - DNA, 21 bp, Homo sapiens
gaaagagagastaattgtaaa

SEQ ID NO: 13245 - DNA, 21 bp, Homo sapiens
acatagaaatraattctgaat

SEQ ID NO: 13246 - DNA, 21 bp, Homo sapiens
gaatgtggtamttgaatttat

SEQ ID NO: 13247 - DNA, 21 bp, Homo sapiens
aacattccttyggctttacca

SEQ ID NO: 13248 - DNA, 21 bp, Homo sapiens
atgcaatttgyaactttgctg

SEQ ID NO: 13249 - DNA, 21 bp, Homo sapiens
aaaaattgcartgaagaaaag

SEQ ID NO: 13250 - DNA, 21 bp, Homo sapiens
cataaaaatcscattctatat

SEQ ID NO: 13251 - DNA, 21 bp, Homo sapiens
ttacaaagtgraatttgagga

SEQ ID NO: 13252 - DNA, 21 bp, Homo sapiens
acattatatcrgtaggtattc

SEQ ID NO: 13253 - DNA, 21 bp, Homo sapiens
agacaaagtaytttatatatg

SEQ ID NO: 13254 - DNA, 21 bp, Homo sapiens
gaaacagatcrttgcaaagta

SEQ ID NO: 13255 - DNA, 21 bp, Homo sapiens
agcacagatgytatatctcta

SEQ ID NO: 13256 - DNA, 21 bp, Homo sapiens
tttttctacckgagtcctttt

SEQ ID NO: 13257 - DNA, 21 bp, Homo sapiens
ccagacacagragcttcgacc

SEQ ID NO: 13258 - DNA, 21 bp, Homo sapiens
cccagaaaagytgtccatcag

SEQ ID NO: 13259 - DNA, 21 bp, Homo sapiens
aagttccatgkctcctagtgt

SEQ ID NO: 13260 - DNA, 21 bp, Homo sapiens
ggatgtaacartagtacttcc

SEQ ID NO: 13261 - DNA, 21 bp, Homo sapiens
tccatcaaaakaatcagattt

SEQ ID NO: 13262 - DNA, 21 bp, Homo sapiens
gttgggaaggrgaaaggaatg

SEQ ID NO: 13263 - DNA, 21 bp, Homo sapiens
gccagtccackctccgaggag

SEQ ID NO: 13264 - DNA, 21 bp, Homo sapiens
atggcagcctyccaaggcctt

SEQ ID NO: 13265 - DNA, 21 bp, Homo sapiens
taatatgttcratcaagaatg

SEQ ID NO: 13266 - DNA, 21 bp, Homo sapiens
aacctgtactrtgactcacaa

SEQ ID NO: 13267 - DNA, 21 bp, Homo sapiens
ttctgataatkttgtggtgga

SEQ ID NO: 13268 - DNA, 21 bp, Homo sapiens
cagtgacatgrcttgtcactt

SEQ ID NO: 13269 - DNA, 21 bp, Homo sapiens
taaaacattgyttgggaggga

SEQ ID NO: 13270 - DNA, 21 bp, Homo sapiens
agatcatcacrtcagtgtgaa

SEQ ID NO: 13271 - DNA, 21 bp, Homo sapiens
tgcttcagtasatttaatgaa

SEQ ID NO: 13272 - DNA, 21 bp, Homo sapiens
taagtgccctrttcggtgatt

SEQ ID NO: 13273 - DNA, 21 bp, Homo sapiens
gatgtgggccygtgcttattt

SEQ ID NO: 13274 - DNA, 21 bp, Homo sapiens
tttacttaackgtggattatt

SEQ ID NO: 13275 - DNA, 21 bp, Homo sapiens
aagcatttctkatttgcttag

SEQ ID NO: 13276 - DNA, 21 bp, Homo sapiens
ttaaaaccttyggaatatgtg

SEQ ID NO: 13277 - DNA, 21 bp, Homo sapiens
ccaaggtctartaatccctca

SEQ ID NO: 13278 - DNA, 21 bp, Homo sapiens
tgttccactaraagtgtgccc

SEQ ID NO: 13279 - DNA, 21 bp, Homo sapiens
tacagaagatmaatatagaga

SEQ ID NO: 13280 - DNA, 21 bp, Homo sapiens
gaaatgaagaragactgagaa

SEQ ID NO: 13281 - DNA, 21 bp, Homo sapiens
actactctcaraaagaagaca

SEQ ID NO: 13282 - DNA, 21 bp, Homo sapiens
aataattaaakttcaacatga

SEQ ID NO: 13283 - DNA, 21 bp, Homo sapiens
ctgtgggaacrattgggccga

SEQ ID NO: 13284 - DNA, 21 bp, Homo sapiens
tttgtcaaagratctttactt

SEQ ID NO: 13285 - DNA, 21 bp, Homo sapiens
aagaatggggkttcttaaaaa

SEQ ID NO: 13286 - DNA, 21 bp, Homo sapiens
atggcagttgyttttgatttg

SEQ ID NO: 13287 - DNA, 21 bp, Homo sapiens
tttgatggggrgaagaaaatt

SEQ ID NO: 13288 - DNA, 21 bp, Homo sapiens
ttagagttcarcagaaatggg

SEQ ID NO: 13289 - DNA, 21 bp, Homo sapiens
atttaagcatktttatcagat

SEQ ID NO: 13290 - DNA, 21 bp, Homo sapiens
ggcggcccacsaggttcacat

SEQ ID NO: 13291 - DNA, 21 bp, Homo sapiens
gtattgttgcrgagtagtatt

SEQ ID NO: 13292 - DNA, 21 bp, Homo sapiens
tccaaagcggytacaccattt

SEQ ID NO: 13293 - DNA, 21 bp, Homo sapiens
agttattaggwttacttcaga

SEQ ID NO: 13294 - DNA, 21 bp, Homo sapiens
cctagactcckggtactccca

SEQ ID NO: 13295 - DNA, 21 bp, Homo sapiens
gaaacattacrtatagtgggt

SEQ ID NO: 13296 - DNA, 21 bp, Homo sapiens
ttatagagccrtttggattta

SEQ ID NO: 13297 - DNA, 21 bp, Homo sapiens
actctgaatcrttaactacag

SEQ ID NO: 13298 - DNA, 21 bp, Homo sapiens
gagggggtctrtttatggcac

SEQ ID NO: 13299 - DNA, 21 bp, Homo sapiens
ccctgtgttgygtggttccat

SEQ ID NO: 13300 - DNA, 21 bp, Homo sapiens
tagattttttwaaaaaaatta

SEQ ID NO: 13301 - DNA, 21 bp, Homo sapiens
ccactcagagrtctctactgg

SEQ ID NO: 13302 - DNA, 21 bp, Homo sapiens
tggtgcaaacmatgtgaacat

SEQ ID NO: 13303 - DNA, 21 bp, Homo sapiens
gaaaggtaccrttaggatttt

SEQ ID NO: 13304 - DNA, 21 bp, Homo sapiens
ttcttccacawatctagggca

SEQ ID NO: 13305 - DNA, 21 bp, Homo sapiens
tgaacttattygttaactctg

SEQ ID NO: 13306 - DNA, 21 bp, Homo sapiens
gccctatttcrgagaaagatg

SEQ ID NO: 13307 - DNA, 21 bp, Homo sapiens
tacagaaggargttcaagcct

SEQ ID NO: 13308 - DNA, 21 bp, Homo sapiens
ggacatgagcrtatttagaaa

SEQ ID NO: 13309 - DNA, 21 bp, Homo sapiens
ctagcagaggmtattaccaac

SEQ ID NO: 13310 - DNA, 21 bp, Homo sapiens
acaaattcagwtggggttata

SEQ ID NO: 13311 - DNA, 21 bp, Homo sapiens
ttacttctttwaaaaaaaatc

SEQ ID NO: 13312 - DNA, 21 bp, Homo sapiens
gtttctgccamctccatgcac

SEQ ID NO: 13313 - DNA, 21 bp, Homo sapiens
gcttttaaatwgttattgtgc

SEQ ID NO: 13314 - DNA, 21 bp, Homo sapiens
tccagagtagygctcctcttc

SEQ ID NO: 13315 - DNA, 21 bp, Homo sapiens
cagtttcttcsttgagcaggc

SEQ ID NO: 13316 - DNA, 21 bp, Homo sapiens
ctggggaaaartatcagcact

SEQ ID NO: 13317 - DNA, 21 bp, Homo sapiens
tggtgttggarcctgcaatga

SEQ ID NO: 13318 - DNA, 21 bp, Homo sapiens
atcttgaaacygctgcaaaaa

SEQ ID NO: 13319 - DNA, 21 bp, Homo sapiens
ttagccaaagkaaagtcagga

SEQ ID NO: 13320 - DNA, 21 bp, Homo sapiens
gattgtgcacygagtgccaca

SEQ ID NO: 13321 - DNA, 21 bp, Homo sapiens
aacaattcttsctgaaaataa

SEQ ID NO: 13322 - DNA, 21 bp, Homo sapiens
cggtagatccygagagagtag

SEQ ID NO: 13323 - DNA, 21 bp, Homo sapiens
ttgaggttaaratgaatgtgg

SEQ ID NO: 13324 - DNA, 21 bp, Homo sapiens
ttttaatttgkgcttgtgtgg

SEQ ID NO: 13325 - DNA, 21 bp, Homo sapiens
aggtgcgcaaytgacgagctt

SEQ ID NO: 13326 - DNA, 21 bp, Homo sapiens
accaaccttaygttgctaaca

SEQ ID NO: 13327 - DNA, 21 bp, Homo sapiens
aaaatttcaamttggtgattg

SEQ ID NO: 13328 - DNA, 21 bp, Homo sapiens
ttaccagccaygggaccttca

SEQ ID NO: 13329 - DNA, 21 bp, Homo sapiens
tggtattagcrttttcctgct

SEQ ID NO: 13330 - DNA, 21 bp, Homo sapiens
caaatattctyatcttttaat

SEQ ID NO: 13331 - DNA, 21 bp, Homo sapiens
aagacagtttrccctgttagc

SEQ ID NO: 13332 - DNA, 21 bp, Homo sapiens
cgccactcccycaacgtccac

SEQ ID NO: 13333 - DNA, 21 bp, Homo sapiens
accaaaggcaytgggggtcaa

SEQ ID NO: 13334 - DNA, 21 bp, Homo sapiens
aagttcatagrtaaaagccct

SEQ ID NO: 13335 - DNA, 21 bp, Homo sapiens
ataccttaaascagaagaccc

SEQ ID NO: 13336 - DNA, 21 bp, Homo sapiens
ccctggtaccrtcatttcatc

SEQ ID NO: 13337 - DNA, 21 bp, Homo sapiens
atttacatttraaatgctgac

SEQ ID NO: 13338 - DNA, 21 bp, Homo sapiens
tcacataaatsttctttgtaa

SEQ ID NO: 13339 - DNA, 21 bp, Homo sapiens
ttgcattctasttttaccctt

SEQ ID NO: 13340 - DNA, 21 bp, Homo sapiens
caactcgaagkatagtgagga

SEQ ID NO: 13341 - DNA, 21 bp, Homo sapiens
gattactcttktcaagcatat

SEQ ID NO: 13342 - DNA, 21 bp, Homo sapiens
ctctccatttrtttaggtctt

SEQ ID NO: 13343 - DNA, 21 bp, Homo sapiens
tcaattatgaytttaacacat

SEQ ID NO: 13344 - DNA, 21 bp, Homo sapiens
caggctagaakgaagtgggca

SEQ ID NO: 13345 - DNA, 21 bp, Homo sapiens
ccatgagttaygtgggtttag

SEQ ID NO: 13346 - DNA, 21 bp, Homo sapiens
atttgttttarctcttcacct

SEQ ID NO: 13347 - DNA, 21 bp, Homo sapiens
aactcagtatygtaaaatgga

SEQ ID NO: 13348 - DNA, 21 bp, Homo sapiens
tgaattgaccrgtgaattaac

SEQ ID NO: 13349 - DNA, 21 bp, Homo sapiens
gttgatgtatracttcagcct

SEQ ID NO: 13350 - DNA, 21 bp, Homo sapiens
ttccagaggtrctttattcct

SEQ ID NO: 13351 - DNA, 21 bp, Homo sapiens
atgcctctgtrtgataatgag

SEQ ID NO: 13352 - DNA, 21 bp, Homo sapiens
taggattaaartaataagagc

SEQ ID NO: 13353 - DNA, 21 bp, Homo sapiens
ctgggctatcycctacacttt

SEQ ID NO: 13354 - DNA, 21 bp, Homo sapiens
cctacaaaaastagtgtgtat

SEQ ID NO: 13355 - DNA, 21 bp, Homo sapiens
taaactaactsatttaagaat

SEQ ID NO: 13356 - DNA, 21 bp, Homo sapiens
agtagagagamagaggaagga

SEQ ID NO: 13357 - DNA, 21 bp, Homo sapiens
aagtcactcartgttgaacac

SEQ ID NO: 13358 - DNA, 21 bp, Homo sapiens
tacattatttygtttgagcta

SEQ ID NO: 13359 - DNA, 21 bp, Homo sapiens
attaaatagtrttttggaaga

SEQ ID NO: 13360 - DNA, 21 bp, Homo sapiens
cagaattatawggctgttaat

SEQ ID NO: 13361 - DNA, 21 bp, Homo sapiens
agacatccacmtcatcttggc

SEQ ID NO: 13362 - DNA, 21 bp, Homo sapiens
gtggaagaaartcttttaatt

SEQ ID NO: 13363 - DNA, 21 bp, Homo sapiens
agtagtgtgtragtatgccca

SEQ ID NO: 13364 - DNA, 21 bp, Homo sapiens
tgacttttgcygaggcacctc

SEQ ID NO: 13365 - DNA, 21 bp, Homo sapiens
ttcaaaaaatsattccagtaa

SEQ ID NO: 13366 - DNA, 21 bp, Homo sapiens
ctgactctgcrgtcaccatgc

SEQ ID NO: 13367 - DNA, 21 bp, Homo sapiens
aatggatctamatttttaaca

SEQ ID NO: 13368 - DNA, 21 bp, Homo sapiens
agggctgtttstgacccctca

SEQ ID NO: 13369 - DNA, 21 bp, Homo sapiens
caaaaggttgwggagagataa

SEQ ID NO: 13370 - DNA, 21 bp, Homo sapiens
ataacccattytcttttctct

SEQ ID NO: 13371 - DNA, 21 bp, Homo sapiens
tttttttagtraggtggtgtc

SEQ ID NO: 13372 - DNA, 21 bp, Homo sapiens
aaaacaaaaayaaaaaccaaa

SEQ ID NO: 13373 - DNA, 21 bp, Homo sapiens
tatcaactacrcagagagcac

SEQ ID NO: 13374 - DNA, 21 bp, Homo sapiens
tgctacctacmaactttttct

SEQ ID NO: 13375 - DNA, 21 bp, Homo sapiens
aagcacccgtygtatggtgta

SEQ ID NO: 13376 - DNA, 21 bp, Homo sapiens
aagagcttacragcaagcgca

SEQ ID NO: 13377 - DNA, 21 bp, Homo sapiens
gtttagtgtayacgtacagag

SEQ ID NO: 13378 - DNA, 21 bp, Homo sapiens
caagcatttcrgtgtaatatt

SEQ ID NO: 13379 - DNA, 21 bp, Homo sapiens
ttgttaaaaamttaatgggtg

SEQ ID NO: 13380 - DNA, 21 bp, Homo sapiens
tgttcccaacrcatagaaaga

SEQ ID NO: 13381 - DNA, 21 bp, Homo sapiens
cagaaacatgrcccagagtat

SEQ ID NO: 13382 - DNA, 21 bp, Homo sapiens
cgggtggtcaytggtgtttta

SEQ ID NO: 13383 - DNA, 21 bp, Homo sapiens
atctgcaaatragttttgttc

SEQ ID NO: 13384 - DNA, 21 bp, Homo sapiens
taattaattcygttaaaaaca

SEQ ID NO: 13385 - DNA, 21 bp, Homo sapiens
tcaacagattscaaactatca

SEQ ID NO: 13386 - DNA, 21 bp, Homo sapiens
ttcaactttcyaattattgcc

SEQ ID NO: 13387 - DNA, 21 bp, Homo sapiens
ttgcctcagaygccctcaaaa

SEQ ID NO: 13388 - DNA, 21 bp, Homo sapiens
gagtactgaayaaattgtgct

SEQ ID NO: 13389 - DNA, 21 bp, Homo sapiens
gaggaagataycaaaactgat

SEQ ID NO: 13390 - DNA, 21 bp, Homo sapiens
cttgggtagastgccatcaat

SEQ ID NO: 13391 - DNA, 21 bp, Homo sapiens
agagctatccyatacatcatt

SEQ ID NO: 13392 - DNA, 21 bp, Homo sapiens
gggaaaatcaktgccagagta

SEQ ID NO: 13393 - DNA, 21 bp, Homo sapiens
ccaaatccctrgtctgaatta

SEQ ID NO: 13394 - DNA, 21 bp, Homo sapiens
gagtggtaagrtcaggggtca

SEQ ID NO: 13395 - DNA, 21 bp, Homo sapiens
tttgagagaarttgtaaaata

SEQ ID NO: 13396 - DNA, 21 bp, Homo sapiens
ttttccctcayctccagttat

SEQ ID NO: 13397 - DNA, 21 bp, Homo sapiens
catttaatacragtttgcaaa

SEQ ID NO: 13398 - DNA, 21 bp, Homo sapiens
ccaatctgtcrtgttttacct

SEQ ID NO: 13399 - DNA, 21 bp, Homo sapiens
ccagagacaayataaaatagt

SEQ ID NO: 13400 - DNA, 21 bp, Homo sapiens
agtagtaactyctattttcac

SEQ ID NO: 13401 - DNA, 21 bp, Homo sapiens
agagagaaaaytgtaaatact

SEQ ID NO: 13402 - DNA, 21 bp, Homo sapiens
aaggttctcarcttcagtgtt

SEQ ID NO: 13403 - DNA, 21 bp, Homo sapiens
tacctccttcyttatctgccc

SEQ ID NO: 13404 - DNA, 21 bp, Homo sapiens
aagcaggaatkaaagtaggat

SEQ ID NO: 13405 - DNA, 21 bp, Homo sapiens
ggtactctgcyccagttccca

SEQ ID NO: 13406 - DNA, 21 bp, Homo sapiens
cagcacatacrtaagtagaga

SEQ ID NO: 13407 - DNA, 21 bp, Homo sapiens
catgttccttrtaatttacaa

SEQ ID NO: 13408 - DNA, 21 bp, Homo sapiens
ttattaaaatrtctatcctag

SEQ ID NO: 13409 - DNA, 21 bp, Homo sapiens
ttttggaatayttgcatatgt

SEQ ID NO: 13410 - DNA, 21 bp, Homo sapiens
ttatcaaaccrtatttcagtt

SEQ ID NO: 13411 - DNA, 21 bp, Homo sapiens
acctccagagrtcctacaaat

SEQ ID NO: 13412 - DNA, 21 bp, Homo sapiens
gagtgagatamcctttcaggg

SEQ ID NO: 13413 - DNA, 21 bp, Homo sapiens
tgggccaaaargtcccaagta

SEQ ID NO: 13414 - DNA, 21 bp, Homo sapiens
tctttcaaacyctactgcagt

SEQ ID NO: 13415 - DNA, 21 bp, Homo sapiens
gcctggctctrttgatgtaag

SEQ ID NO: 13416 - DNA, 21 bp, Homo sapiens
gtggctaaaamttacagctct

SEQ ID NO: 13417 - DNA, 21 bp, Homo sapiens
aaggatgactrtaggataaat

SEQ ID NO: 13418 - DNA, 21 bp, Homo sapiens
agattttgaaragtttgaggt

SEQ ID NO: 13419 - DNA, 21 bp, Homo sapiens
tttttgaaatstctaatacat

SEQ ID NO: 13420 - DNA, 21 bp, Homo sapiens
agaggttatgyaggattgata

SEQ ID NO: 13421 - DNA, 21 bp, Homo sapiens
taaaaatttargattgttgtg

SEQ ID NO: 13422 - DNA, 21 bp, Homo sapiens
tcttgtgtggrtggcctatta

SEQ ID NO: 13423 - DNA, 21 bp, Homo sapiens
taattttttcycactagaacc

SEQ ID NO: 13424 - DNA, 21 bp, Homo sapiens
aaattctccckcttgagggac

SEQ ID NO: 13425 - DNA, 21 bp, Homo sapiens
ggaaagggccrttgcacaata

SEQ ID NO: 13426 - DNA, 21 bp, Homo sapiens
aatacctaccycttaaatgtt

SEQ ID NO: 13427 - DNA, 21 bp, Homo sapiens
aatttggtaaygctgatataa

SEQ ID NO: 13428 - DNA, 21 bp, Homo sapiens
ttccagtcctrtttgatggcc

SEQ ID NO: 13429 - DNA, 21 bp, Homo sapiens
agtggcaggartacagtttaa

SEQ ID NO: 13430 - DNA, 21 bp, Homo sapiens
tgtctggaaastattttgaga

SEQ ID NO: 13431 - DNA, 21 bp, Homo sapiens
ataaatgagawcatatggtat

SEQ ID NO: 13432 - DNA, 21 bp, Homo sapiens
ctgtcagctgrgggttgtgtt

SEQ ID NO: 13433 - DNA, 21 bp, Homo sapiens
ccacataacaygtcctataac

SEQ ID NO: 13434 - DNA, 21 bp, Homo sapiens
ctgcctaatawaaattctatt

SEQ ID NO: 13435 - DNA, 21 bp, Homo sapiens
ttcaatgcggwctgaactggc

SEQ ID NO: 13436 - DNA, 21 bp, Homo sapiens
accccaccaarttgcttctgc

SEQ ID NO: 13437 - DNA, 21 bp, Homo sapiens
agcaccaagcrggttcccggg

SEQ ID NO: 13438 - DNA, 21 bp, Homo sapiens
atccgtgttgyagtttggatc

SEQ ID NO: 13439 - DNA, 21 bp, Homo sapiens
taacaattaasagtagagaaa

SEQ ID NO: 13440 - DNA, 21 bp, Homo sapiens
agatgacctcrgacgaacacc

SEQ ID NO: 13441 - DNA, 21 bp, Homo sapiens
ctttcttgttkatagtctatt

SEQ ID NO: 13442 - DNA, 21 bp, Homo sapiens
aatctgtatcrtccatctgta

SEQ ID NO: 13443 - DNA, 21 bp, Homo sapiens
ccaggatcacmtatttaagga

SEQ ID NO: 13444 - DNA, 21 bp, Homo sapiens
ggagaaaacakaagtagttgc

SEQ ID NO: 13445 - DNA, 21 bp, Homo sapiens
tctgaatatcrcccagaagtc

SEQ ID NO: 13446 - DNA, 21 bp, Homo sapiens
gtaggaatatygtataggctt

SEQ ID NO: 13447 - DNA, 21 bp, Homo sapiens
atggaggtagmcattagaagt

SEQ ID NO: 13448 - DNA, 21 bp, Homo sapiens
caaggcagtayctctgtgagt

SEQ ID NO: 13449 - DNA, 21 bp, Homo sapiens
atgataatttyaattgttgct

SEQ ID NO: 13450 - DNA, 21 bp, Homo sapiens
acagggattcmacttcatgtg

SEQ ID NO: 13451 - DNA, 21 bp, Homo sapiens
cacaacttatwtgtacaacag

SEQ ID NO: 13452 - DNA, 21 bp, Homo sapiens
aataagccatkgcttttttca

SEQ ID NO: 13453 - DNA, 21 bp, Homo sapiens
gagtgtacttyaggggaaacc

SEQ ID NO: 13454 - DNA, 21 bp, Homo sapiens
attagaaaaawaatcattagg

SEQ ID NO: 13455 - DNA, 21 bp, Homo sapiens
agtaatagctytggggcaagg

SEQ ID NO: 13456 - DNA, 21 bp, Homo sapiens
ggataaatatrgccttttcaa

SEQ ID NO: 13457 - DNA, 21 bp, Homo sapiens
ttctatgagtrttttagcaac

SEQ ID NO: 13458 - DNA, 21 bp, Homo sapiens
agcaatcctgktcccataaat

SEQ ID NO: 13459 - DNA, 21 bp, Homo sapiens
ttttatttaastcccagtaca

SEQ ID NO: 13460 - DNA, 21 bp, Homo sapiens
ttctttcttgscagctttaga

SEQ ID NO: 13461 - DNA, 21 bp, Homo sapiens
catctggactstctcttcttt

SEQ ID NO: 13462 - DNA, 21 bp, Homo sapiens
gcctgcatgcmtgtttatcat

SEQ ID NO: 13463 - DNA, 21 bp, Homo sapiens
tatgttatggyttactaatta

SEQ ID NO: 13464 - DNA, 21 bp, Homo sapiens
ctagtccaggyttttctcttc

SEQ ID NO: 13465 - DNA, 21 bp, Homo sapiens
gcgggaggcamccgggatgtg

SEQ ID NO: 13466 - DNA, 21 bp, Homo sapiens
catctgaagcrtatgaacaga

SEQ ID NO: 13467 - DNA, 21 bp, Homo sapiens
attacattggrtttacagatt

SEQ ID NO: 13468 - DNA, 21 bp, Homo sapiens
ttagaatgtcrgaaatgttaa

SEQ ID NO: 13469 - DNA, 21 bp, Homo sapiens
tccacgtcagytttcttctat

SEQ ID NO: 13470 - DNA, 21 bp, Homo sapiens
gtttttccatkgtgtccttgt

SEQ ID NO: 13471 - DNA, 21 bp, Homo sapiens
aaaactgggayaagctaggaa

SEQ ID NO: 13472 - DNA, 21 bp, Homo sapiens
atgacaaatgrtctttttaat

SEQ ID NO: 13473 - DNA, 21 bp, Homo sapiens
tgcgtgactcwgcctggcacc

SEQ ID NO: 13474 - DNA, 21 bp, Homo sapiens
tttagagaggraacaggaaaa

SEQ ID NO: 13475 - DNA, 21 bp, Homo sapiens
gaaagaagccrggctaaaaaa

SEQ ID NO: 13476 - DNA, 21 bp, Homo sapiens
cagtaacattkagtgggctta

SEQ ID NO: 13477 - DNA, 21 bp, Homo sapiens
catgaggagarctaaattctg

SEQ ID NO: 13478 - DNA, 21 bp, Homo sapiens
aaaaattcacwtccaactttt

SEQ ID NO: 13479 - DNA, 21 bp, Homo sapiens
agctagggtcragtggggagc

SEQ ID NO: 13480 - DNA, 21 bp, Homo sapiens
cctaggcaacmactattctat

SEQ ID NO: 13481 - DNA, 21 bp, Homo sapiens
ataactataargtaaaaatca

SEQ ID NO: 13482 - DNA, 21 bp, Homo sapiens
ggcgtgaaacygggagggagc

SEQ ID NO: 13483 - DNA, 21 bp, Homo sapiens
ctcaaggtctytgcactggca

SEQ ID NO: 13484 - DNA, 21 bp, Homo sapiens
atccaaatttmtaagtaaagc

SEQ ID NO: 13485 - DNA, 21 bp, Homo sapiens
gagtctaccayagctggcagg

SEQ ID NO: 13486 - DNA, 21 bp, Homo sapiens
gagaagaaatrcagttataat

SEQ ID NO: 13487 - DNA, 21 bp, Homo sapiens
gtgttgttcartacttctgta

SEQ ID NO: 13488 - DNA, 21 bp, Homo sapiens
gacagttgagytgcttcccaa

SEQ ID NO: 13489 - DNA, 21 bp, Homo sapiens
agattacactratatacatat

SEQ ID NO: 13490 - DNA, 21 bp, Homo sapiens
tatatggcacytttttttcct

SEQ ID NO: 13491 - DNA, 21 bp, Homo sapiens
accctttggarttcttcactg

SEQ ID NO: 13492 - DNA, 21 bp, Homo sapiens
agctcatacawctaataatgt

SEQ ID NO: 13493 - DNA, 21 bp, Homo sapiens
ttagaccttayaggattgtat

SEQ ID NO: 13494 - DNA, 21 bp, Homo sapiens
aattcttctcytcctaccgat

SEQ ID NO: 13495 - DNA, 21 bp, Homo sapiens
aactgctttgraaagagctgt

SEQ ID NO: 13496 - DNA, 21 bp, Homo sapiens
ctagaagaaamtatttgctaa

SEQ ID NO: 13497 - DNA, 21 bp, Homo sapiens
aaatataatgycaggtatgaa

SEQ ID NO: 13498 - DNA, 21 bp, Homo sapiens
ttagagactayaaagaatgct

SEQ ID NO: 13499 - DNA, 21 bp, Homo sapiens
taatggcatcyttttcagcaa

SEQ ID NO: 13500 - DNA, 21 bp, Homo sapiens
cacagtgtctrttgttcccat

SEQ ID NO: 13501 - DNA, 21 bp, Homo sapiens
aagagaatttscagtttgttt

SEQ ID NO: 13502 - DNA, 21 bp, Homo sapiens
gaaataatgcwgcaccaaaag

SEQ ID NO: 13503 - DNA, 21 bp, Homo sapiens
gtgaataaatktattcattat

SEQ ID NO: 13504 - DNA, 21 bp, Homo sapiens
atcaattaacmggagtcatga

SEQ ID NO: 13505 - DNA, 21 bp, Homo sapiens
tctacctgatyagaattttta

SEQ ID NO: 13506 - DNA, 21 bp, Homo sapiens
tgtgtgtacawttgtgtgtgg

SEQ ID NO: 13507 - DNA, 21 bp, Homo sapiens
tctgagaaatkgcttgcgctg

SEQ ID NO: 13508 - DNA, 21 bp, Homo sapiens
atggatcagakaaattagata

SEQ ID NO: 13509 - DNA, 21 bp, Homo sapiens
tacagtaaaamttatttacga

SEQ ID NO: 13510 - DNA, 21 bp, Homo sapiens
ctagcggtgargtaaagatga

SEQ ID NO: 13511 - DNA, 21 bp, Homo sapiens
gtaatagtggmctctaaggca

SEQ ID NO: 13512 - DNA, 21 bp, Homo sapiens
gttcttctgawcatttttggc

SEQ ID NO: 13513 - DNA, 21 bp, Homo sapiens
ttttctagctmaatttacctt

SEQ ID NO: 13514 - DNA, 21 bp, Homo sapiens
catggtaaaarccacagtaaa

SEQ ID NO: 13515 - DNA, 21 bp, Homo sapiens
attatttcacygatttaaact

SEQ ID NO: 13516 - DNA, 21 bp, Homo sapiens
cctgagcaatraaggccacaa

SEQ ID NO: 13517 - DNA, 21 bp, Homo sapiens
gagacacagtsgtaaaaaacc

SEQ ID NO: 13518 - DNA, 21 bp, Homo sapiens
ggatgtagggrtgaaggcctg

SEQ ID NO: 13519 - DNA, 21 bp, Homo sapiens
caaaatagcartcttgattct

SEQ ID NO: 13520 - DNA, 21 bp, Homo sapiens
cttttcagtcrgtccaacgcc

SEQ ID NO: 13521 - DNA, 21 bp, Homo sapiens
ctgtgaggccwgtgctccttt

SEQ ID NO: 13522 - DNA, 21 bp, Homo sapiens
tttaaaggcayggtgtgacac

SEQ ID NO: 13523 - DNA, 21 bp, Homo sapiens
gtttgccataygttaccagga

SEQ ID NO: 13524 - DNA, 21 bp, Homo sapiens
cttgtcccccrgagaaaccca

SEQ ID NO: 13525 - DNA, 21 bp, Homo sapiens
attccccaaamgaaagctgag

SEQ ID NO: 13526 - DNA, 21 bp, Homo sapiens
aaattctattrtgataaaacc

SEQ ID NO: 13527 - DNA, 21 bp, Homo sapiens
tccctcaagcrctggtgtttg

SEQ ID NO: 13528 - DNA, 21 bp, Homo sapiens
gaaaggcacasagtggcaagt

SEQ ID NO: 13529 - DNA, 21 bp, Homo sapiens
atgtttacatyatagagacaa

SEQ ID NO: 13530 - DNA, 21 bp, Homo sapiens
agactcatcayccacaaaatg

SEQ ID NO: 13531 - DNA, 21 bp, Homo sapiens
ctgtttgttgraaatgagaca

SEQ ID NO: 13532 - DNA, 21 bp, Homo sapiens
agattatgagrcctgatagaa

SEQ ID NO: 13533 - DNA, 21 bp, Homo sapiens
gtattacaacmtgcacttaaa

SEQ ID NO: 13534 - DNA, 21 bp, Homo sapiens
ccttgtaggtkggtcagccaa

SEQ ID NO: 13535 - DNA, 21 bp, Homo sapiens
actctgcagtrtagttcttga

SEQ ID NO: 13536 - DNA, 21 bp, Homo sapiens
caaataagacraggagttcag

SEQ ID NO: 13537 - DNA, 21 bp, Homo sapiens
actctgtgacrgttgcacaac

SEQ ID NO: 13538 - DNA, 21 bp, Homo sapiens
ttcttgcagargttcatcttt

SEQ ID NO: 13539 - DNA, 21 bp, Homo sapiens
tttcctcattyactggtcacc

SEQ ID NO: 13540 - DNA, 21 bp, Homo sapiens
tccgagacatwtttgattgtc

SEQ ID NO: 13541 - DNA, 21 bp, Homo sapiens
agggtgaatasttgctctcta

SEQ ID NO: 13542 - DNA, 21 bp, Homo sapiens
cctttaacccrtttcccatat

SEQ ID NO: 13543 - DNA, 21 bp, Homo sapiens
ctatccattarttcatcttat

SEQ ID NO: 13544 - DNA, 21 bp, Homo sapiens
ctcctgtgcaraatctccctg

SEQ ID NO: 13545 - DNA, 21 bp, Homo sapiens
caaacaaacawcatcaaggca

SEQ ID NO: 13546 - DNA, 21 bp, Homo sapiens
tttaatacttyctatattttg

SEQ ID NO: 13547 - DNA, 21 bp, Homo sapiens
ggctgctgatstatttgatac

SEQ ID NO: 13548 - DNA, 21 bp, Homo sapiens
tcagattttgktgggaaaatc

SEQ ID NO: 13549 - DNA, 21 bp, Homo sapiens
aaataatagayctctattgcc

SEQ ID NO: 13550 - DNA, 21 bp, Homo sapiens
gttaggttgtygtctacctgc

SEQ ID NO: 13551 - DNA, 21 bp, Homo sapiens
aattactaacrtattttctct

SEQ ID NO: 13552 - DNA, 21 bp, Homo sapiens
gctccaggatyccaccatagg

SEQ ID NO: 13553 - DNA, 21 bp, Homo sapiens
gtggctgggarcctggcttcg

SEQ ID NO: 13554 - DNA, 21 bp, Homo sapiens
atgacttcagsctctgccttt

SEQ ID NO: 13555 - DNA, 21 bp, Homo sapiens
gcccagagagrtgaagtggct

SEQ ID NO: 13556 - DNA, 21 bp, Homo sapiens
ggtgccctgcrcgattttctc

SEQ ID NO: 13557 - DNA, 21 bp, Homo sapiens
ccacacacagycccctccagg

SEQ ID NO: 13558 - DNA, 21 bp, Homo sapiens
aacatagcacyccacctgtac

SEQ ID NO: 13559 - DNA, 21 bp, Homo sapiens
ctgaatcctayaaattcatag

SEQ ID NO: 13560 - DNA, 21 bp, Homo sapiens
tggaatgttcyccgcctccca

SEQ ID NO: 13561 - DNA, 21 bp, Homo sapiens
ttatttgtccsttggctgact

SEQ ID NO: 13562 - DNA, 21 bp, Homo sapiens
cagaagtttcytgtgtgcccc

SEQ ID NO: 13563 - DNA, 21 bp, Homo sapiens
atgccagtcayatgctcagaa

SEQ ID NO: 13564 - DNA, 21 bp, Homo sapiens
gggcaggtgtragctttgtgg

SEQ ID NO: 13565 - DNA, 21 bp, Homo sapiens
gcctgggtggygcaggcaggc

SEQ ID NO: 13566 - DNA, 21 bp, Homo sapiens
ttgcttcctgkagtcaccgac

SEQ ID NO: 13567 - DNA, 21 bp, Homo sapiens
tcaggcttgcygttgggacag

SEQ ID NO: 13568 - DNA, 21 bp, Homo sapiens
taccctgtgaygttagtttca

SEQ ID NO: 13569 - DNA, 21 bp, Homo sapiens
ttatcagtctyttctttatgg

SEQ ID NO: 13570 - DNA, 21 bp, Homo sapiens
tctacccatcmctagaagtag

SEQ ID NO: 13571 - DNA, 21 bp, Homo sapiens
tccagaagccygatgtggact

SEQ ID NO: 13572 - DNA, 21 bp, Homo sapiens
taattttcctwcctttggaga

SEQ ID NO: 13573 - DNA, 21 bp, Homo sapiens
aggatgctggyggcacagtga

SEQ ID NO: 13574 - DNA, 21 bp, Homo sapiens
tgccattgccycagctcctcc

SEQ ID NO: 13575 - DNA, 21 bp, Homo sapiens
aattattgggkgtttagagaa

SEQ ID NO: 13576 - DNA, 21 bp, Homo sapiens
gaaccacaaarttttacttga

SEQ ID NO: 13577 - DNA, 21 bp, Homo sapiens
cctcctggctrcctcgcagtc

SEQ ID NO: 13578 - DNA, 21 bp, Homo sapiens
ggagacccccmgctcccctct

SEQ ID NO: 13579 - DNA, 21 bp, Homo sapiens
tgagtgaagcrgagctcctca

SEQ ID NO: 13580 - DNA, 21 bp, Homo sapiens
tggacgacccygacaccttgt

SEQ ID NO: 13581 - DNA, 21 bp, Homo sapiens
gtactgataaygaccatttct

SEQ ID NO: 13582 - DNA, 21 bp, Homo sapiens
tatagggatgrgggtgaagtc

SEQ ID NO: 13583 - DNA, 21 bp, Homo sapiens
tgaccctggcygtcctgacca

SEQ ID NO: 13584 - DNA, 21 bp, Homo sapiens
tggggtggggygggctcaggt

SEQ ID NO: 13585 - DNA, 21 bp, Homo sapiens
gccatctattwtgaaaggttt

SEQ ID NO: 13586 - DNA, 21 bp, Homo sapiens
gcaagaaggcrgggagcagca

SEQ ID NO: 13587 - DNA, 21 bp, Homo sapiens
tttgtaagtaraagtttttag

SEQ ID NO: 13588 - DNA, 21 bp, Homo sapiens
taaaaaaatasaacaaacaat

SEQ ID NO: 13589 - DNA, 21 bp, Homo sapiens
acatgaaggcraatatcaagg

SEQ ID NO: 13590 - DNA, 21 bp, Homo sapiens
tcacctgaaawcacttggaag

SEQ ID NO: 13591 - DNA, 21 bp, Homo sapiens
gcataagaacygtagggccca

SEQ ID NO: 13592 - DNA, 21 bp, Homo sapiens
tagcctggctytacaacataa

SEQ ID NO: 13593 - DNA, 21 bp, Homo sapiens
aaacttgatayactgtaccta

SEQ ID NO: 13594 - DNA, 21 bp, Homo sapiens
gagtgattgtyggctgagagc

SEQ ID NO: 13595 - DNA, 21 bp, Homo sapiens
aataaatggcrctaagaaaac

SEQ ID NO: 13596 - DNA, 21 bp, Homo sapiens
aattcaattasagaaagtttc

SEQ ID NO: 13597 - DNA, 21 bp, Homo sapiens
gaacagtcaayaggaagctaa

SEQ ID NO: 13598 - DNA, 21 bp, Homo sapiens
actgaccaacrttagattcca

SEQ ID NO: 13599 - DNA, 21 bp, Homo sapiens
aaagtggcaaygtagaaattc

SEQ ID NO: 13600 - DNA, 21 bp, Homo sapiens
aatgctattaycaaacttgat

SEQ ID NO: 13601 - DNA, 21 bp, Homo sapiens
gagctataatratttcagcct

SEQ ID NO: 13602 - DNA, 21 bp, Homo sapiens
taatcttagtrtatcacagag

SEQ ID NO: 13603 - DNA, 21 bp, Homo sapiens
aatccttcgtscagaaatact

SEQ ID NO: 13604 - DNA, 21 bp, Homo sapiens
acagtaaattytgttaattac

SEQ ID NO: 13605 - DNA, 21 bp, Homo sapiens
aataggtactwactggaattt

SEQ ID NO: 13606 - DNA, 21 bp, Homo sapiens
ggtacgaaaargttctggaaa

SEQ ID NO: 13607 - DNA, 21 bp, Homo sapiens
ccatccagctscatggaactg

SEQ ID NO: 13608 - DNA, 21 bp, Homo sapiens
agaatacagaytttcaaacat

SEQ ID NO: 13609 - DNA, 21 bp, Homo sapiens
ctgtctttacktctagctgta

SEQ ID NO: 13610 - DNA, 21 bp, Homo sapiens
caacagggtgrttgtaaggat

SEQ ID NO: 13611 - DNA, 21 bp, Homo sapiens
aacataacacrcttcacaaaa

SEQ ID NO: 13612 - DNA, 21 bp, Homo sapiens
tgtggaaggcmggacttcctt

SEQ ID NO: 13613 - DNA, 21 bp, Homo sapiens
gcaacaagtcygacttcttgc

SEQ ID NO: 13614 - DNA, 21 bp, Homo sapiens
tggataaatamcccatttctc

SEQ ID NO: 13615 - DNA, 21 bp, Homo sapiens
gtgatcacccrtaggcagaaa

SEQ ID NO: 13616 - DNA, 21 bp, Homo sapiens
atggaggcagmccctgggagt

SEQ ID NO: 13617 - DNA, 21 bp, Homo sapiens
acagattttcyacagattctt

SEQ ID NO: 13618 - DNA, 21 bp, Homo sapiens
gggccgctccsgagctgggac

SEQ ID NO: 13619 - DNA, 21 bp, Homo sapiens
atggtgtgccrggctatcctt

SEQ ID NO: 13620 - DNA, 21 bp, Homo sapiens
catgctctgaygctctatgcc

SEQ ID NO: 13621 - DNA, 21 bp, Homo sapiens
tctgcatgtcyagattatacc

SEQ ID NO: 13622 - DNA, 21 bp, Homo sapiens
aggcaaatgartgatggaaag

SEQ ID NO: 13623 - DNA, 21 bp, Homo sapiens
atgtggagacrggagaaaaat

SEQ ID NO: 13624 - DNA, 21 bp, Homo sapiens
agagtgaggcsttcctgctga

SEQ ID NO: 13625 - DNA, 21 bp, Homo sapiens
tgtggccccaygacatcatat

SEQ ID NO: 13626 - DNA, 21 bp, Homo sapiens
gggacataacmgtaggtggcc

SEQ ID NO: 13627 - DNA, 21 bp, Homo sapiens
ctatttgacaytttgaccatt

SEQ ID NO: 13628 - DNA, 21 bp, Homo sapiens
ttagctccttkttatggctga

SEQ ID NO: 13629 - DNA, 21 bp, Homo sapiens
taaataatagytttcatagtg

SEQ ID NO: 13630 - DNA, 21 bp, Homo sapiens
tttccttcatwctattaatgt

SEQ ID NO: 13631 - DNA, 21 bp, Homo sapiens
aaaatttttcrtaagactgtt

SEQ ID NO: 13632 - DNA, 21 bp, Homo sapiens
aaccacacccragtaattttt

SEQ ID NO: 13633 - DNA, 21 bp, Homo sapiens
aattttctcasgctgctataa

SEQ ID NO: 13634 - DNA, 21 bp, Homo sapiens
cctctatgctrgtttcccagg

SEQ ID NO: 13635 - DNA, 21 bp, Homo sapiens
caccttgggtmccttaaagat

SEQ ID NO: 13636 - DNA, 21 bp, Homo sapiens
tgcagagctgygggtttataa

SEQ ID NO: 13637 - DNA, 21 bp, Homo sapiens
aagttctttawggttcttccc

SEQ ID NO: 13638 - DNA, 21 bp, Homo sapiens
agctgagcagwtgttggtgct

SEQ ID NO: 13639 - DNA, 21 bp, Homo sapiens
ccctggggccygatcacaatg

SEQ ID NO: 13640 - DNA, 21 bp, Homo sapiens
taatgaacatytctgcacatc

SEQ ID NO: 13641 - DNA, 21 bp, Homo sapiens
tgtgtggtctyttgtgagttt

SEQ ID NO: 13642 - DNA, 21 bp, Homo sapiens
atggtgcttayggtccaatga

SEQ ID NO: 13643 - DNA, 21 bp, Homo sapiens
tctggaggacrgacctgctgc

SEQ ID NO: 13644 - DNA, 21 bp, Homo sapiens
caatatttctktctgttttta

SEQ ID NO: 13645 - DNA, 21 bp, Homo sapiens
tccacctcttmctgcctgtat

SEQ ID NO: 13646 - DNA, 21 bp, Homo sapiens
agccaagagcrcttgctgagt

SEQ ID NO: 13647 - DNA, 21 bp, Homo sapiens
ctcctcagccrgacaatgggg

SEQ ID NO: 13648 - DNA, 21 bp, Homo sapiens
accttcaaacmtgccttcagg

SEQ ID NO: 13649 - DNA, 21 bp, Homo sapiens
ctacatctgcmtgccagtaca

SEQ ID NO: 13650 - DNA, 21 bp, Homo sapiens
attagtggagytggtggtggg

SEQ ID NO: 13651 - DNA, 21 bp, Homo sapiens
ctggcccctayacagaaaatt

SEQ ID NO: 13652 - DNA, 21 bp, Homo sapiens
aactttgtccrtaactcgggc

SEQ ID NO: 13653 - DNA, 21 bp, Homo sapiens
tttattatagrgtcgtttatg

SEQ ID NO: 13654 - DNA, 21 bp, Homo sapiens
cagactcaccracttgattgg

SEQ ID NO: 13655 - DNA, 21 bp, Homo sapiens
gatcagatgcygctttaaaat

SEQ ID NO: 13656 - DNA, 21 bp, Homo sapiens
tctggctcacygtaagtactc

SEQ ID NO: 13657 - DNA, 21 bp, Homo sapiens
actccagcctratggtctcct

SEQ ID NO: 13658 - DNA, 21 bp, Homo sapiens
cggcgcgagcyctaacgcaga

SEQ ID NO: 13659 - DNA, 21 bp, Homo sapiens
tgcctcctccrtctgaatggg

SEQ ID NO: 13660 - DNA, 21 bp, Homo sapiens
ttttttttttyttgtaaaggg

SEQ ID NO: 13661 - DNA, 21 bp, Homo sapiens
agagaagtagrccttcaaata

SEQ ID NO: 13662 - DNA, 21 bp, Homo sapiens
tggaaattctkggacaacgtg

SEQ ID NO: 13663 - DNA, 21 bp, Homo sapiens
ttcgtccactrcatcacaaat

SEQ ID NO: 13664 - DNA, 21 bp, Homo sapiens
caaaactgggrgcacggaagg

SEQ ID NO: 13665 - DNA, 21 bp, Homo sapiens
aaaaccaaggrtctagttcaa

SEQ ID NO: 13666 - DNA, 21 bp, Homo sapiens
ggaaatgggcrtttgggatgg

SEQ ID NO: 13667 - DNA, 21 bp, Homo sapiens
accctgaaagyaggcaatcct

SEQ ID NO: 13668 - DNA, 21 bp, Homo sapiens
gccactcaggkgtcagcactg

SEQ ID NO: 13669 - DNA, 21 bp, Homo sapiens
tacatgtttayccatgataca

SEQ ID NO: 13670 - DNA, 21 bp, Homo sapiens
tgaagaagaamcccctgtgcc

SEQ ID NO: 13671 - DNA, 21 bp, Homo sapiens
tgcaggggaaycctaattaga

SEQ ID NO: 13672 - DNA, 21 bp, Homo sapiens
tctgcaaagaygcttttactg

SEQ ID NO: 13673 - DNA, 21 bp, Homo sapiens
gaacctatttraggtgacaag

SEQ ID NO: 13674 - DNA, 21 bp, Homo sapiens
atgtgtcagcrtttcagtgta

SEQ ID NO: 13675 - DNA, 21 bp, Homo sapiens
aaggtataggyccataaatct

SEQ ID NO: 13676 - DNA, 21 bp, Homo sapiens
atgccattcartgtttgtgtt

SEQ ID NO: 13677 - DNA, 21 bp, Homo sapiens
atctcacgtasacatggattt

SEQ ID NO: 13678 - DNA, 21 bp, Homo sapiens
gtgtgttgtckgcatatagag

SEQ ID NO: 13679 - DNA, 21 bp, Homo sapiens
tttgtgtgaartaagagtagc

SEQ ID NO: 13680 - DNA, 21 bp, Homo sapiens
ctctgaatatycatttctctc

SEQ ID NO: 13681 - DNA, 21 bp, Homo sapiens
ggcaacctgargctctgagaa

SEQ ID NO: 13682 - DNA, 21 bp, Homo sapiens
tggagcctacygcatggagtt

SEQ ID NO: 13683 - DNA, 21 bp, Homo sapiens
gatcagatagwcctgggttga

SEQ ID NO: 13684 - DNA, 21 bp, Homo sapiens
tttaaatgggmtgggcagaga

SEQ ID NO: 13685 - DNA, 21 bp, Homo sapiens
gtgcaattgakttgttagctg

SEQ ID NO: 13686 - DNA, 21 bp, Homo sapiens
gctaccttccwaccctgagtc

SEQ ID NO: 13687 - DNA, 21 bp, Homo sapiens
gcagatcaagygtgttggagg

SEQ ID NO: 13688 - DNA, 21 bp, Homo sapiens
tattggctgarcttgggccag

SEQ ID NO: 13689 - DNA, 21 bp, Homo sapiens
tggtccaggartagacacatg

SEQ ID NO: 13690 - DNA, 21 bp, Homo sapiens
acaagatcccrgtgaattcat

SEQ ID NO: 13691 - DNA, 21 bp, Homo sapiens
tcatatatccmagatcgtatt

SEQ ID NO: 13692 - DNA, 21 bp, Homo sapiens
aatgacaacartaatatattt

SEQ ID NO: 13693 - DNA, 21 bp, Homo sapiens
gtgccaggacragcgtaacac

SEQ ID NO: 13694 - DNA, 21 bp, Homo sapiens
cctttaaaaasagaactacaa

SEQ ID NO: 13695 - DNA, 21 bp, Homo sapiens
gcacacgcggsaaagaacacc

SEQ ID NO: 13696 - DNA, 21 bp, Homo sapiens
agcctcgtgcrttggtggctc

SEQ ID NO: 13697 - DNA, 21 bp, Homo sapiens
gttctacaggwaaattgtgtg

SEQ ID NO: 13698 - DNA, 21 bp, Homo sapiens
tttaggcgagktttttttttt

SEQ ID NO: 13699 - DNA, 21 bp, Homo sapiens
cggatttagarctaccctggc

SEQ ID NO: 13700 - DNA, 21 bp, Homo sapiens
aaggggctgtrgaagtgacct

SEQ ID NO: 13701 - DNA, 21 bp, Homo sapiens
ggaagcctcckcccacctcca

SEQ ID NO: 13702 - DNA, 21 bp, Homo sapiens
tcagggcaccyatggccccag

SEQ ID NO: 13703 - DNA, 21 bp, Homo sapiens
ctacagcgttktagcgcccag

SEQ ID NO: 13704 - DNA, 21 bp, Homo sapiens
tgggtgtgcamctgtcccgct

SEQ ID NO: 13705 - DNA, 21 bp, Homo sapiens
gtgaatcagtraaactgtgtg

SEQ ID NO: 13706 - DNA, 21 bp, Homo sapiens
gaacatcagcrcgagggtaat

SEQ ID NO: 13707 - DNA, 21 bp, Homo sapiens
tctgagaaatstgtgagagca

SEQ ID NO: 13708 - DNA, 21 bp, Homo sapiens
agggttccatytaaaggacat

SEQ ID NO: 13709 - DNA, 21 bp, Homo sapiens
gggccaagggygggtacaggt

SEQ ID NO: 13710 - DNA, 21 bp, Homo sapiens
actataggtgwcctctcctgc

SEQ ID NO: 13711 - DNA, 21 bp, Homo sapiens
tccagtccacrttggccttgg

SEQ ID NO: 13712 - DNA, 21 bp, Homo sapiens
gtgctctcagyagggtcaggc

SEQ ID NO: 13713 - DNA, 21 bp, Homo sapiens
gaagcaggcakgggtgtggct

SEQ ID NO: 13714 - DNA, 21 bp, Homo sapiens
aaccgctttgraaaaagttat

SEQ ID NO: 13715 - DNA, 21 bp, Homo sapiens
aagagctcgtycccgtcagct

SEQ ID NO: 13716 - DNA, 21 bp, Homo sapiens
tcctgactgcrggttaacagg

SEQ ID NO: 13717 - DNA, 21 bp, Homo sapiens
acagtgcgtcyatgaaccatg

SEQ ID NO: 13718 - DNA, 21 bp, Homo sapiens
ctgtcttcttstaggagctcg

SEQ ID NO: 13719 - DNA, 21 bp, Homo sapiens
aaaggcaccaraccatcctca

SEQ ID NO: 13720 - DNA, 21 bp, Homo sapiens
tgtggctcaayttcctcactg

SEQ ID NO: 13721 - DNA, 21 bp, Homo sapiens
aaggatttggyggtgtcactt

SEQ ID NO: 13722 - DNA, 21 bp, Homo sapiens
tgctacttacygttgtttcat

SEQ ID NO: 13723 - DNA, 21 bp, Homo sapiens
attgggctgayggaagattct

SEQ ID NO: 13724 - DNA, 21 bp, Homo sapiens
ctgcatggccrgttctctgcc

SEQ ID NO: 13725 - DNA, 21 bp, Homo sapiens
gagtctcagcwcctcacatga

SEQ ID NO: 13726 - DNA, 21 bp, Homo sapiens
aggttccttckgccacatctg

SEQ ID NO: 13727 - DNA, 21 bp, Homo sapiens
gtgcagggtcyctggtgaccg

SEQ ID NO: 13728 - DNA, 21 bp, Homo sapiens
gcacgtctggrctccacttgc

SEQ ID NO: 13729 - DNA, 21 bp, Homo sapiens
atgtggtggaragacctcttc

SEQ ID NO: 13730 - DNA, 21 bp, Homo sapiens
catcaggctckgacgtgttgc

SEQ ID NO: 13731 - DNA, 21 bp, Homo sapiens
aacaacagttytgtgccccat

SEQ ID NO: 13732 - DNA, 21 bp, Homo sapiens
gagaccatccytctcattttg

SEQ ID NO: 13733 - DNA, 21 bp, Homo sapiens
aggccagcccsgagttgagac

SEQ ID NO: 13734 - DNA, 21 bp, Homo sapiens
agctctgagcrtgggggttcc

SEQ ID NO: 13735 - DNA, 21 bp, Homo sapiens
tggcgaaagayggccacattt

SEQ ID NO: 13736 - DNA, 21 bp, Homo sapiens
ccatcaagggkttcaaaaatt

SEQ ID NO: 13737 - DNA, 21 bp, Homo sapiens
gaaagccatgmcagcagtgcc

SEQ ID NO: 13738 - DNA, 21 bp, Homo sapiens
tagagggagcmgctggtacaa

SEQ ID NO: 13739 - DNA, 21 bp, Homo sapiens
ctggggacggwtcctccactg

SEQ ID NO: 13740 - DNA, 21 bp, Homo sapiens
cccccaacacmtactggttca

SEQ ID NO: 13741 - DNA, 21 bp, Homo sapiens
ttaggctgcaycaattggaga

SEQ ID NO: 13742 - DNA, 21 bp, Homo sapiens
gggggtggggktggtccaggg

SEQ ID NO: 13743 - DNA, 21 bp, Homo sapiens
aaaaatacatrcagtgaaaaa

SEQ ID NO: 13744 - DNA, 21 bp, Homo sapiens
gggttgaattrtgttccctgt

SEQ ID NO: 13745 - DNA, 21 bp, Homo sapiens
accttgcactscagcagctct

SEQ ID NO: 13746 - DNA, 21 bp, Homo sapiens
tcctcactgtycccatcccag

SEQ ID NO: 13747 - DNA, 21 bp, Homo sapiens
gcgggaagtgragggcggtgg

SEQ ID NO: 13748 - DNA, 21 bp, Homo sapiens
gaacactcgasttggtgacca

SEQ ID NO: 13749 - DNA, 21 bp, Homo sapiens
ggaccacagayggcccagttc

SEQ ID NO: 13750 - DNA, 21 bp, Homo sapiens
gtctacagttkttaccacaag

SEQ ID NO: 13751 - DNA, 21 bp, Homo sapiens
ccaggtactcytgcagggcgc

SEQ ID NO: 13752 - DNA, 21 bp, Homo sapiens
gagctgaagcyatctcaaaga

SEQ ID NO: 13753 - DNA, 21 bp, Homo sapiens
tcctgggtgcrggaggtcggg

SEQ ID NO: 13754 - DNA, 21 bp, Homo sapiens
ttaccaccacrtaacagatga

SEQ ID NO: 13755 - DNA, 21 bp, Homo sapiens
ttcattgggartcacccattt

SEQ ID NO: 13756 - DNA, 21 bp, Homo sapiens
cagctccggcracaagccgag

SEQ ID NO: 13757 - DNA, 21 bp, Homo sapiens
tgtggttgccrccacttcctc

SEQ ID NO: 13758 - DNA, 21 bp, Homo sapiens
tattgcaggayttaaaaactg

SEQ ID NO: 13759 - DNA, 21 bp, Homo sapiens
agtggcttacrcctgtaatcc

SEQ ID NO: 13760 - DNA, 21 bp, Homo sapiens
aacggacttayacaatagatg

SEQ ID NO: 13761 - DNA, 21 bp, Homo sapiens
tagatggaggygtggagaatg

SEQ ID NO: 13762 - DNA, 21 bp, Homo sapiens
gtattgggaarcatgtttgcg

SEQ ID NO: 13763 - DNA, 21 bp, Homo sapiens
aacagataatragtgaatatt

SEQ ID NO: 13764 - DNA, 21 bp, Homo sapiens
cctgtcccctygtgaatgtgt

SEQ ID NO: 13765 - DNA, 21 bp, Homo sapiens
ggcttttcctytgggaatttc

SEQ ID NO: 13766 - DNA, 21 bp, Homo sapiens
ggcttttggcrttctgcacaa

SEQ ID NO: 13767 - DNA, 21 bp, Homo sapiens
catgacaatcrcagaactgac

SEQ ID NO: 13768 - DNA, 21 bp, Homo sapiens
gagaagtccckcactgacctt

SEQ ID NO: 13769 - DNA, 21 bp, Homo sapiens
tcaccggccarccattgtcag

SEQ ID NO: 13770 - DNA, 21 bp, Homo sapiens
tcacaccgtcscagagggtga

SEQ ID NO: 13771 - DNA, 21 bp, Homo sapiens
gtcccagaggstgaggcactc

SEQ ID NO: 13772 - DNA, 21 bp, Homo sapiens
tagtcaccaaractgatttgt

SEQ ID NO: 13773 - DNA, 21 bp, Homo sapiens
aacttggtccrtgggatttcc

SEQ ID NO: 13774 - DNA, 21 bp, Homo sapiens
ggcaggaaacrtacaactctt

SEQ ID NO: 13775 - DNA, 21 bp, Homo sapiens
agacatattcrttattggact

SEQ ID NO: 13776 - DNA, 21 bp, Homo sapiens
tgtcattgatwgcaggttagg

SEQ ID NO: 13777 - DNA, 21 bp, Homo sapiens
tcacaagggtrtagtgtgact

SEQ ID NO: 13778 - DNA, 21 bp, Homo sapiens
cgggagttgaraagaaacgat

SEQ ID NO: 13779 - DNA, 21 bp, Homo sapiens
ccggaggtccstcatgctgat

SEQ ID NO: 13780 - DNA, 21 bp, Homo sapiens
cttccaaatgmtttacagcct

SEQ ID NO: 13781 - DNA, 21 bp, Homo sapiens
agcctgggacrctaaaccagc

SEQ ID NO: 13782 - DNA, 21 bp, Homo sapiens
catggctggayccccgcagaa

SEQ ID NO: 13783 - DNA, 21 bp, Homo sapiens
ggccacctcartgacgatgcg

SEQ ID NO: 13784 - DNA, 21 bp, Homo sapiens
ctctttgagcrctgctgttgg

SEQ ID NO: 13785 - DNA, 21 bp, Homo sapiens
gctgtgtcggygttcctcagg

SEQ ID NO: 13786 - DNA, 21 bp, Homo sapiens
tgaggaagcgycatcatgagc

SEQ ID NO: 13787 - DNA, 21 bp, Homo sapiens
tcctggtgcgmgccaaaggtg

SEQ ID NO: 13788 - DNA, 21 bp, Homo sapiens
aaggccgagcygcacaacctt

SEQ ID NO: 13789 - DNA, 21 bp, Homo sapiens
ggccctgctcyggcgccaggc

SEQ ID NO: 13790 - DNA, 21 bp, Homo sapiens
atcccgccagstgcaccgggt

SEQ ID NO: 13791 - DNA, 21 bp, Homo sapiens
gaaggctgcaygtggcctgaa

SEQ ID NO: 13792 - DNA, 21 bp, Homo sapiens
cagcacctccrgcggcccgtg

SEQ ID NO: 13793 - DNA, 21 bp, Homo sapiens
accaccctggsgggtaggcag

SEQ ID NO: 13794 - DNA, 21 bp, Homo sapiens
atcagaggtgrcttgtgcccc

SEQ ID NO: 13795 - DNA, 21 bp, Homo sapiens
tgggctacacstggatgacct

SEQ ID NO: 13796 - DNA, 21 bp, Homo sapiens
ggaagaatacygcttggccct

SEQ ID NO: 13797 - DNA, 21 bp, Homo sapiens
aagccgcctargctcaaagcc

SEQ ID NO: 13798 - DNA, 21 bp, Homo sapiens
ggattccaggkttctttagta

SEQ ID NO: 13799 - DNA, 21 bp, Homo sapiens
gctttctgggkttactgagtt

SEQ ID NO: 13800 - DNA, 21 bp, Homo sapiens
atgcctttaarttgcccctct

SEQ ID NO: 13801 - DNA, 21 bp, Homo sapiens
tggggaaaagycctaaaaggg

SEQ ID NO: 13802 - DNA, 21 bp, Homo sapiens
gcgctcttgtrcaacaggtaa

SEQ ID NO: 13803 - DNA, 21 bp, Homo sapiens
cagcctgacckcatttttcaa

SEQ ID NO: 13804 - DNA, 21 bp, Homo sapiens
cagattctggsgcaacagagt

SEQ ID NO: 13805 - DNA, 21 bp, Homo sapiens
agaggacactygagtctttct

SEQ ID NO: 13806 - DNA, 21 bp, Homo sapiens
tatcttaaggrccaattccaa

SEQ ID NO: 13807 - DNA, 21 bp, Homo sapiens
ggcaaagaacrtcatgctaga

SEQ ID NO: 13808 - DNA, 21 bp, Homo sapiens
cttagcctgtracttcattca

SEQ ID NO: 13809 - DNA, 21 bp, Homo sapiens
gcatttctgawtaagatctgg

SEQ ID NO: 13810 - DNA, 21 bp, Homo sapiens
agattctcttrttgccttaaa

SEQ ID NO: 13811 - DNA, 21 bp, Homo sapiens
tttaggctcckagggaacact

SEQ ID NO: 13812 - DNA, 21 bp, Homo sapiens
aagaccccttmccactgctct

SEQ ID NO: 13813 - DNA, 21 bp, Homo sapiens
tcaggtggtcrcccagcaagg

SEQ ID NO: 13814 - DNA, 21 bp, Homo sapiens
gaggcagaagragtggggagg

SEQ ID NO: 13815 - DNA, 21 bp, Homo sapiens
ttgcttgtgcrgatacctggt

SEQ ID NO: 13816 - DNA, 21 bp, Homo sapiens
gcttcctacarcagtgtggtc

SEQ ID NO: 13817 - DNA, 21 bp, Homo sapiens
aggagtgacaraagagggaca

SEQ ID NO: 13818 - DNA, 21 bp, Homo sapiens
cccgcctccakccgccgctct

SEQ ID NO: 13819 - DNA, 21 bp, Homo sapiens
aaatgatttgytggaaattct

SEQ ID NO: 13820 - DNA, 21 bp, Homo sapiens
atttttattgyaatactggta

SEQ ID NO: 13821 - DNA, 21 bp, Homo sapiens
gtgcctaaccygtatcctgtc

SEQ ID NO: 13822 - DNA, 21 bp, Homo sapiens
atgtagaatgragtctaaagt

SEQ ID NO: 13823 - DNA, 21 bp, Homo sapiens
gaaggtcgtgrtcaaggtttc

SEQ ID NO: 13824 - DNA, 21 bp, Homo sapiens
tatagtccttragaggaaagt

SEQ ID NO: 13825 - DNA, 21 bp, Homo sapiens
attcaaatgakagctttattt

SEQ ID NO: 13826 - DNA, 21 bp, Homo sapiens
ttgtaggagcygcagtgggag

SEQ ID NO: 13827 - DNA, 21 bp, Homo sapiens
ttaattatatmtctgtagcta

SEQ ID NO: 13828 - DNA, 21 bp, Homo sapiens
tattctgtctycccacgtttc

SEQ ID NO: 13829 - DNA, 21 bp, Homo sapiens
tgactatttgrcaaagcttct

SEQ ID NO: 13830 - DNA, 21 bp, Homo sapiens
ctgtatttccktctgtctatt

SEQ ID NO: 13831 - DNA, 21 bp, Homo sapiens
ctcatctgctstcgatttctg

SEQ ID NO: 13832 - DNA, 21 bp, Homo sapiens
aagatttctgyggatgttaaa

SEQ ID NO: 13833 - DNA, 21 bp, Homo sapiens
aactgataccrtggaaggtaa

SEQ ID NO: 13834 - DNA, 21 bp, Homo sapiens
ctgtgtgtggyatgtccttga

SEQ ID NO: 13835 - DNA, 21 bp, Homo sapiens
ttttctctgtraggttttgtg

SEQ ID NO: 13836 - DNA, 21 bp, Homo sapiens
ttcttgccaaygctcattaag

SEQ ID NO: 13837 - DNA, 21 bp, Homo sapiens
ctctctatcarcttttgcaaa

SEQ ID NO: 13838 - DNA, 21 bp, Homo sapiens
tggtagccgcyaagttctcct

SEQ ID NO: 13839 - DNA, 21 bp, Homo sapiens
atgaagtgggmaaaaatcttg

SEQ ID NO: 13840 - DNA, 21 bp, Homo sapiens
atgctcaaaayataagagtaa

SEQ ID NO: 13841 - DNA, 21 bp, Homo sapiens
agggaaaagtkttttttttaa

SEQ ID NO: 13842 - DNA, 21 bp, Homo sapiens
cttaatggatraacttttgtt

SEQ ID NO: 13843 - DNA, 21 bp, Homo sapiens
gactagatctwttccaaattg

SEQ ID NO: 13844 - DNA, 21 bp, Homo sapiens
catacagtccrtaagaaaatg

SEQ ID NO: 13845 - DNA, 21 bp, Homo sapiens
cttgacgtctytttaatgtta

SEQ ID NO: 13846 - DNA, 21 bp, Homo sapiens
cagggtgttcrcattgccctt

SEQ ID NO: 13847 - DNA, 21 bp, Homo sapiens
agtaattaggrgagtgaagac

SEQ ID NO: 13848 - DNA, 21 bp, Homo sapiens
atcccctggcygcatggctta

SEQ ID NO: 13849 - DNA, 21 bp, Homo sapiens
ctcagaatgcygatttctctt

SEQ ID NO: 13850 - DNA, 21 bp, Homo sapiens
tccgtggttgrctgaatggca

SEQ ID NO: 13851 - DNA, 21 bp, Homo sapiens
aggatagcatrcggaataaac

SEQ ID NO: 13852 - DNA, 21 bp, Homo sapiens
ccttgttatcstaaagggcac

SEQ ID NO: 13853 - DNA, 21 bp, Homo sapiens
gctcattttcwtccccactgt

SEQ ID NO: 13854 - DNA, 21 bp, Homo sapiens
gaccaccagtygcttaccaaa

SEQ ID NO: 13855 - DNA, 21 bp, Homo sapiens
tcagaggaaargcatggcggg

SEQ ID NO: 13856 - DNA, 21 bp, Homo sapiens
ttgcagatggmagactgaggg

SEQ ID NO: 13857 - DNA, 21 bp, Homo sapiens
ctccctttgtrtagccttccc

SEQ ID NO: 13858 - DNA, 21 bp, Homo sapiens
agatagctttyggaggaggga

SEQ ID NO: 13859 - DNA, 21 bp, Homo sapiens
gaatataaaaytttttagaaa

SEQ ID NO: 13860 - DNA, 21 bp, Homo sapiens
gctctggcatytcagcttcat

SEQ ID NO: 13861 - DNA, 21 bp, Homo sapiens
tttctagccakctagggactt

SEQ ID NO: 13862 - DNA, 21 bp, Homo sapiens
ctagcacaacsacgacccttg

SEQ ID NO: 13863 - DNA, 21 bp, Homo sapiens
gctaggcctgkgttgtcctcc

SEQ ID NO: 13864 - DNA, 21 bp, Homo sapiens
gcccctgaatyagatgggttg

SEQ ID NO: 13865 - DNA, 21 bp, Homo sapiens
atctgtttatsagcaggatgc

SEQ ID NO: 13866 - DNA, 21 bp, Homo sapiens
ttgcacagacygtcacagacc

SEQ ID NO: 13867 - DNA, 21 bp, Homo sapiens
taaccaagaarttaaatcaat

SEQ ID NO: 13868 - DNA, 21 bp, Homo sapiens
tggagtgtcayagacacgcag

SEQ ID NO: 13869 - DNA, 21 bp, Homo sapiens
tagccagtctrgcatgcaagg

SEQ ID NO: 13870 - DNA, 21 bp, Homo sapiens
gcacccagagmagttccatga

SEQ ID NO: 13871 - DNA, 21 bp, Homo sapiens
ctttgtggcamagtgaccatc

SEQ ID NO: 13872 - DNA, 21 bp, Homo sapiens
atttggagccytttctgaaac

SEQ ID NO: 13873 - DNA, 21 bp, Homo sapiens
ctccaattctstagagaccat

SEQ ID NO: 13874 - DNA, 21 bp, Homo sapiens
gggtcatgatyagatgggatt

SEQ ID NO: 13875 - DNA, 21 bp, Homo sapiens
attcatacacrtggctgtggg

SEQ ID NO: 13876 - DNA, 21 bp, Homo sapiens
tatctacatcytagccttaga

SEQ ID NO: 13877 - DNA, 21 bp, Homo sapiens
tcccacggtcrgtccagccta

SEQ ID NO: 13878 - DNA, 21 bp, Homo sapiens
gaggcctctayattaacttcc

SEQ ID NO: 13879 - DNA, 21 bp, Homo sapiens
ttgacaaggcwgacccagctg

SEQ ID NO: 13880 - DNA, 21 bp, Homo sapiens
gggccaggtaragccacagag

SEQ ID NO: 13881 - DNA, 21 bp, Homo sapiens
atggctttcarttagttttcc

SEQ ID NO: 13882 - DNA, 21 bp, Homo sapiens
atttatctttmatgttctttc

SEQ ID NO: 13883 - DNA, 21 bp, Homo sapiens
gattttgttayggaaggcagt

SEQ ID NO: 13884 - DNA, 21 bp, Homo sapiens
ggtttgcagarttatttcaga

SEQ ID NO: 13885 - DNA, 21 bp, Homo sapiens
tgagcaggackttgtgtctca

SEQ ID NO: 13886 - DNA, 21 bp, Homo sapiens
gcgacagaggkggacccagct

SEQ ID NO: 13887 - DNA, 21 bp, Homo sapiens
aggcaagcgtrctgctccctc

SEQ ID NO: 13888 - DNA, 21 bp, Homo sapiens
atgaatagagraagactctgg

SEQ ID NO: 13889 - DNA, 21 bp, Homo sapiens
cctctggggamcccgtctgta

SEQ ID NO: 13890 - DNA, 21 bp, Homo sapiens
taattgtcttsccttcctttt

SEQ ID NO: 13891 - DNA, 21 bp, Homo sapiens
tgacctatgartttatctggg

SEQ ID NO: 13892 - DNA, 21 bp, Homo sapiens
cacttgagttsaccctcactt

SEQ ID NO: 13893 - DNA, 21 bp, Homo sapiens
tgcagagagarccctaaatgc

SEQ ID NO: 13894 - DNA, 21 bp, Homo sapiens
ggccggtaagrctggcttgtt

SEQ ID NO: 13895 - DNA, 21 bp, Homo sapiens
agagccaggaytcgaactcag

SEQ ID NO: 13896 - DNA, 21 bp, Homo sapiens
caggaaactcrcgcagtctca

SEQ ID NO: 13897 - DNA, 21 bp, Homo sapiens
cagagcctggygtccttagag

SEQ ID NO: 13898 - DNA, 21 bp, Homo sapiens
tggcctcatakagtgctagaa

SEQ ID NO: 13899 - DNA, 21 bp, Homo sapiens
ctggaagtgcyggatactgtg

SEQ ID NO: 13900 - DNA, 21 bp, Homo sapiens
gggcttagctycaccaaacta

SEQ ID NO: 13901 - DNA, 21 bp, Homo sapiens
tttgagaatcygcacattaaa

SEQ ID NO: 13902 - DNA, 21 bp, Homo sapiens
ggagaactcarccctcaggca

SEQ ID NO: 13903 - DNA, 21 bp, Homo sapiens
atggctaccasgtgaaaatgc

SEQ ID NO: 13904 - DNA, 21 bp, Homo sapiens
ttttgggggawtgtcctgttt

SEQ ID NO: 13905 - DNA, 21 bp, Homo sapiens
aaatagatccmggggtaaaca

SEQ ID NO: 13906 - DNA, 21 bp, Homo sapiens
ctgcatggaamgggggtggga

SEQ ID NO: 13907 - DNA, 21 bp, Homo sapiens
gcaaatatagrttggtctctc

SEQ ID NO: 13908 - DNA, 21 bp, Homo sapiens
ccatcagtagrggccaaggta

SEQ ID NO: 13909 - DNA, 21 bp, Homo sapiens
cctaatgaggyccttcccagc

SEQ ID NO: 13910 - DNA, 21 bp, Homo sapiens
aggggcatggygaacagtctc

SEQ ID NO: 13911 - DNA, 21 bp, Homo sapiens
ttttaccttcrgctctcttgc

SEQ ID NO: 13912 - DNA, 21 bp, Homo sapiens
aagattgcacrgaaggttttg

SEQ ID NO: 13913 - DNA, 21 bp, Homo sapiens
agggtgggatmcagttgtctg

SEQ ID NO: 13914 - DNA, 21 bp, Homo sapiens
tgcagtcaccrtcaacatgca

SEQ ID NO: 13915 - DNA, 21 bp, Homo sapiens
tcctctaacartcctggagtc

SEQ ID NO: 13916 - DNA, 21 bp, Homo sapiens
cagcagggccytgctccgtct

SEQ ID NO: 13917 - DNA, 21 bp, Homo sapiens
ctttgtttctscatctgtaca

SEQ ID NO: 13918 - DNA, 21 bp, Homo sapiens
tgaccagagakcagggggatg

SEQ ID NO: 13919 - DNA, 21 bp, Homo sapiens
gactaagagcragaggattag

SEQ ID NO: 13920 - DNA, 21 bp, Homo sapiens
gtaatcctgcygatgatgtat

SEQ ID NO: 13921 - DNA, 21 bp, Homo sapiens
taactgatggytcatcagaca

SEQ ID NO: 13922 - DNA, 21 bp, Homo sapiens
cctgggcaccwttctctctgc

SEQ ID NO: 13923 - DNA, 21 bp, Homo sapiens
gcatttcaagkcttgctagtc

SEQ ID NO: 13924 - DNA, 21 bp, Homo sapiens
ctttatacttscctggtactg

SEQ ID NO: 13925 - DNA, 21 bp, Homo sapiens
tgatgcacagmgtggagacca

SEQ ID NO: 13926 - DNA, 21 bp, Homo sapiens
agtgggatgargggggtgcgg

SEQ ID NO: 13927 - DNA, 21 bp, Homo sapiens
caggtaaccasggctgtgagg

SEQ ID NO: 13928 - DNA, 21 bp, Homo sapiens
gaacttttgtrctagagatga

SEQ ID NO: 13929 - DNA, 21 bp, Homo sapiens
ctggcatacasgggtggctat

SEQ ID NO: 13930 - DNA, 21 bp, Homo sapiens
agttgagaacyactgctgtag

SEQ ID NO: 13931 - DNA, 21 bp, Homo sapiens
ccactacccaygttctgcttc

SEQ ID NO: 13932 - DNA, 21 bp, Homo sapiens
atgagaagggsacacataggc

SEQ ID NO: 13933 - DNA, 21 bp, Homo sapiens
atgaaaacagygatatgccat

SEQ ID NO: 13934 - DNA, 21 bp, Homo sapiens
ttatagcaatrttatagagtt

SEQ ID NO: 13935 - DNA, 21 bp, Homo sapiens
ctgggaccagmgctaggggtg

SEQ ID NO: 13936 - DNA, 21 bp, Homo sapiens
aagcaacctcytgttggaagc

SEQ ID NO: 13937 - DNA, 21 bp, Homo sapiens
tgagagtgtcraggggactgt

SEQ ID NO: 13938 - DNA, 21 bp, Homo sapiens
cattcattcayctattcatct

SEQ ID NO: 13939 - DNA, 21 bp, Homo sapiens
ggttttccccrtaagggacac

SEQ ID NO: 13940 - DNA, 21 bp, Homo sapiens
actgggtcccyagcattagtt

SEQ ID NO: 13941 - DNA, 21 bp, Homo sapiens
acataaaaaartttagaaatt

SEQ ID NO: 13942 - DNA, 21 bp, Homo sapiens
gattctttgcrtccctgaaca

SEQ ID NO: 13943 - DNA, 21 bp, Homo sapiens
tcttccgtctsttctacaaag

SEQ ID NO: 13944 - DNA, 21 bp, Homo sapiens
aggatatggtsagaacatcaa

SEQ ID NO: 13945 - DNA, 21 bp, Homo sapiens
tacgtgagtgygtattgcata

SEQ ID NO: 13946 - DNA, 21 bp, Homo sapiens
cccaagtgatytgaaccccaa

SEQ ID NO: 13947 - DNA, 21 bp, Homo sapiens
gcaagttttcycctaaggaag

SEQ ID NO: 13948 - DNA, 21 bp, Homo sapiens
tagaccggagygaaggattgg

SEQ ID NO: 13949 - DNA, 21 bp, Homo sapiens
cttaaagatamcccagtttgg

SEQ ID NO: 13950 - DNA, 21 bp, Homo sapiens
gggcaacagtmtggaggtgag

SEQ ID NO: 13951 - DNA, 21 bp, Homo sapiens
caagactcacrgccacaaacc

SEQ ID NO: 13952 - DNA, 21 bp, Homo sapiens
ttttacatccrtctttatggc

SEQ ID NO: 13953 - DNA, 21 bp, Homo sapiens
ttgtatcatgmgatctagggc

SEQ ID NO: 13954 - DNA, 21 bp, Homo sapiens
cacgtgcagcraaagaggaga

SEQ ID NO: 13955 - DNA, 21 bp, Homo sapiens
gctctttgctytccctgctcc

SEQ ID NO: 13956 - DNA, 21 bp, Homo sapiens
gttcctttgakattcacaggt

SEQ ID NO: 13957 - DNA, 21 bp, Homo sapiens
gagttagccargactgtggac

SEQ ID NO: 13958 - DNA, 21 bp, Homo sapiens
gaagatgttaycccaaggaaa

SEQ ID NO: 13959 - DNA, 21 bp, Homo sapiens
aggagggagcrtgcagattag

SEQ ID NO: 13960 - DNA, 21 bp, Homo sapiens
tctcagcgtgycccttctcct

SEQ ID NO: 13961 - DNA, 21 bp, Homo sapiens
gctctaatcarcaacacctgg

SEQ ID NO: 13962 - DNA, 21 bp, Homo sapiens
ttctcaggggytgggatggcc

SEQ ID NO: 13963 - DNA, 21 bp, Homo sapiens
cattccacagkggcatgggca

SEQ ID NO: 13964 - DNA, 21 bp, Homo sapiens
ccctagaaatyatctggccac

SEQ ID NO: 13965 - DNA, 21 bp, Homo sapiens
tctttctattytgactctgag

SEQ ID NO: 13966 - DNA, 21 bp, Homo sapiens
gttcacataaygcacacaaat

SEQ ID NO: 13967 - DNA, 21 bp, Homo sapiens
ttaaaggactygaggaattgt

SEQ ID NO: 13968 - DNA, 21 bp, Homo sapiens
agaaattgcastaggtcatac

SEQ ID NO: 13969 - DNA, 21 bp, Homo sapiens
aaactcctttrgaaaaacttc

SEQ ID NO: 13970 - DNA, 21 bp, Homo sapiens
gcctcctgggyctgggctgtg

SEQ ID NO: 13971 - DNA, 21 bp, Homo sapiens
gttgttgatgmcagaagtaca

SEQ ID NO: 13972 - DNA, 21 bp, Homo sapiens
aggagcctgcyagccctgctg

SEQ ID NO: 13973 - DNA, 21 bp, Homo sapiens
agaacgagccyggacagtggg

SEQ ID NO: 13974 - DNA, 21 bp, Homo sapiens
tgtcaaaaatkaaatgagggg

SEQ ID NO: 13975 - DNA, 21 bp, Homo sapiens
cagttggcatycactggggag

SEQ ID NO: 13976 - DNA, 21 bp, Homo sapiens
tccttcctccrttgatcgact

SEQ ID NO: 13977 - DNA, 21 bp, Homo sapiens
agtggaaagtraggggcagca

SEQ ID NO: 13978 - DNA, 21 bp, Homo sapiens
ttttatttgcyagcctttctg

SEQ ID NO: 13979 - DNA, 21 bp, Homo sapiens
tttgacacacrctattttttg

SEQ ID NO: 13980 - DNA, 21 bp, Homo sapiens
ggggcaaaagraacaaatctg

SEQ ID NO: 13981 - DNA, 21 bp, Homo sapiens
catgggtctaytttagttcct

SEQ ID NO: 13982 - DNA, 21 bp, Homo sapiens
tcccaaagagscttatattgc

SEQ ID NO: 13983 - DNA, 21 bp, Homo sapiens
ccaccctcgarccttccagcc

SEQ ID NO: 13984 - DNA, 21 bp, Homo sapiens
tttgaattttyttccatgtgt

SEQ ID NO: 13985 - DNA, 21 bp, Homo sapiens
tcatccttcayctgaaaccct

SEQ ID NO: 13986 - DNA, 21 bp, Homo sapiens
tcattggaatktttcatgtgt

SEQ ID NO: 13987 - DNA, 21 bp, Homo sapiens
ccataccctaygtatacctac

SEQ ID NO: 13988 - DNA, 21 bp, Homo sapiens
atttcctgackttcccccctc

SEQ ID NO: 13989 - DNA, 21 bp, Homo sapiens
caactgagccraggcatcaat

SEQ ID NO: 13990 - DNA, 21 bp, Homo sapiens
ctccagaggcygctttctgtt

SEQ ID NO: 13991 - DNA, 21 bp, Homo sapiens
aaaccctcccrtcagacacag

SEQ ID NO: 13992 - DNA, 21 bp, Homo sapiens
aacacaacatygcaactgaac

SEQ ID NO: 13993 - DNA, 21 bp, Homo sapiens
gaaaagagggrgaagtgccac

SEQ ID NO: 13994 - DNA, 21 bp, Homo sapiens
agattggaatmgttctaaagc

SEQ ID NO: 13995 - DNA, 21 bp, Homo sapiens
tacctgtttgrggctcagtct

SEQ ID NO: 13996 - DNA, 21 bp, Homo sapiens
tctatagaacsaggaaggtct

SEQ ID NO: 13997 - DNA, 21 bp, Homo sapiens
ttcagttgctyccccctagag

SEQ ID NO: 13998 - DNA, 21 bp, Homo sapiens
taaaacttatsttttactcca

SEQ ID NO: 13999 - DNA, 21 bp, Homo sapiens
cctgggcacaygccctgtttc

SEQ ID NO: 14000 - DNA, 21 bp, Homo sapiens
ccaggagggaygtctccagga

SEQ ID NO: 14001 - DNA, 21 bp, Homo sapiens
caatggaaggmaccagctgca

SEQ ID NO: 14002 - DNA, 21 bp, Homo sapiens
catgattaaaygattgatttg

SEQ ID NO: 14003 - DNA, 21 bp, Homo sapiens
tattattggaygatccccagg

SEQ ID NO: 14004 - DNA, 21 bp, Homo sapiens
ccagaaatgasgaagtcactc

SEQ ID NO: 14005 - DNA, 21 bp, Homo sapiens
tacacggtgcrataagtgttg

SEQ ID NO: 14006 - DNA, 21 bp, Homo sapiens
tatgtgcagcygtttagcatg

SEQ ID NO: 14007 - DNA, 21 bp, Homo sapiens
cagtcatccartatcaagaag

SEQ ID NO: 14008 - DNA, 21 bp, Homo sapiens
ataataaatcyttgcaatatc

SEQ ID NO: 14009 - DNA, 21 bp, Homo sapiens
tttctattttkgtctcaagaa

SEQ ID NO: 14010 - DNA, 21 bp, Homo sapiens
gagacctgggwaatgtggccg

SEQ ID NO: 14011 - DNA, 21 bp, Homo sapiens
atctatgcagyaggcgttctg

SEQ ID NO: 14012 - DNA, 21 bp, Homo sapiens
acaatttttcygtggaggcat

SEQ ID NO: 14013 - DNA, 21 bp, Homo sapiens
ctgaccaagcrtatcatttta

SEQ ID NO: 14014 - DNA, 21 bp, Homo sapiens
tggagcctccmgcccagagga

SEQ ID NO: 14015 - DNA, 21 bp, Homo sapiens
cttgctgaggrttggttgtca

SEQ ID NO: 14016 - DNA, 21 bp, Homo sapiens
aaagatctttsacttgatttc

SEQ ID NO: 14017 - DNA, 21 bp, Homo sapiens
gggaaaaattygtttattaga

SEQ ID NO: 14018 - DNA, 21 bp, Homo sapiens
ctttatctctytgtcctttga

SEQ ID NO: 14019 - DNA, 21 bp, Homo sapiens
tagtgttctgygtgtctagaa

SEQ ID NO: 14020 - DNA, 21 bp, Homo sapiens
ccagctgcccrtgcctgcaaa

SEQ ID NO: 14021 - DNA, 21 bp, Homo sapiens
gagctgatgcygataaaggaa

SEQ ID NO: 14022 - DNA, 21 bp, Homo sapiens
tgagatggggyttaaataaaa

SEQ ID NO: 14023 - DNA, 21 bp, Homo sapiens
ttgaaggccaycaagtcggcg

SEQ ID NO: 14024 - DNA, 21 bp, Homo sapiens
caattcccccstttttaaaaa

SEQ ID NO: 14025 - DNA, 21 bp, Homo sapiens
cctgttccccsctccgcccca

SEQ ID NO: 14026 - DNA, 21 bp, Homo sapiens
agcccactaayaggtgagctg

SEQ ID NO: 14027 - DNA, 21 bp, Homo sapiens
tcgacatctcraggggcaaag

SEQ ID NO: 14028 - DNA, 21 bp, Homo sapiens
ttaaaagtccyttggaaaggg

SEQ ID NO: 14029 - DNA, 21 bp, Homo sapiens
gaatatttttrgaatattctg

SEQ ID NO: 14030 - DNA, 21 bp, Homo sapiens
cacatgcactyacgcacacaa

SEQ ID NO: 14031 - DNA, 21 bp, Homo sapiens
gcccgggcggmcgcagcttag

SEQ ID NO: 14032 - DNA, 21 bp, Homo sapiens
ccctggatccygggctcgcgg

SEQ ID NO: 14033 - DNA, 21 bp, Homo sapiens
cctgtactgcrctccggtaga

SEQ ID NO: 14034 - DNA, 21 bp, Homo sapiens
agagtgggggwtattctttat

SEQ ID NO: 14035 - DNA, 21 bp, Homo sapiens
taaaaaaaatytacgctgcca

SEQ ID NO: 14036 - DNA, 21 bp, Homo sapiens
gccagggaacrcagccctaag

SEQ ID NO: 14037 - DNA, 21 bp, Homo sapiens
ttcatcttttmatacattcat

SEQ ID NO: 14038 - DNA, 21 bp, Homo sapiens
gaacttggggraaaaaaaaaa

SEQ ID NO: 14039 - DNA, 21 bp, Homo sapiens
attctaccgtsgaatattcta

SEQ ID NO: 14040 - DNA, 21 bp, Homo sapiens
tgccccagcaktggtgtgtga

SEQ ID NO: 14041 - DNA, 21 bp, Homo sapiens
tgtttaactcstcttttatat

SEQ ID NO: 14042 - DNA, 21 bp, Homo sapiens
ccagccttccrcacagtgctg

SEQ ID NO: 14043 - DNA, 21 bp, Homo sapiens
gttttatttawgtttatggaa

SEQ ID NO: 14044 - DNA, 21 bp, Homo sapiens
ctttctgctcytgaacctctg

SEQ ID NO: 14045 - DNA, 21 bp, Homo sapiens
tctgtatggtygctctcactc

SEQ ID NO: 14046 - DNA, 21 bp, Homo sapiens
aatatttgttyaatagtataa

SEQ ID NO: 14047 - DNA, 21 bp, Homo sapiens
caactagcatycctacctgta

SEQ ID NO: 14048 - DNA, 21 bp, Homo sapiens
ttgtggaaatrgaatcttgtg

SEQ ID NO: 14049 - DNA, 21 bp, Homo sapiens
gtagtctgttrggctagaaat

SEQ ID NO: 14050 - DNA, 21 bp, Homo sapiens
atttttggaayagtaggtaaa

SEQ ID NO: 14051 - DNA, 21 bp, Homo sapiens
tatataaagckccactgcttt

SEQ ID NO: 14052 - DNA, 21 bp, Homo sapiens
tagccattctrtaacagcaaa

SEQ ID NO: 14053 - DNA, 21 bp, Homo sapiens
ggaaggattgygggggaactg

SEQ ID NO: 14054 - DNA, 21 bp, Homo sapiens
tccaagcagcrtgcagcttgt

SEQ ID NO: 14055 - DNA, 21 bp, Homo sapiens
atttttcaackctcctgttac

SEQ ID NO: 14056 - DNA, 21 bp, Homo sapiens
ccaagggcatrcatgtattgt

SEQ ID NO: 14057 - DNA, 21 bp, Homo sapiens
gatctctgagwtgggttctgg

SEQ ID NO: 14058 - DNA, 21 bp, Homo sapiens
aagccaaaaamaaaatcagca

SEQ ID NO: 14059 - DNA, 21 bp, Homo sapiens
atgtctcctcrttggatttga

SEQ ID NO: 14060 - DNA, 21 bp, Homo sapiens
tttgttttctytgggttagca

SEQ ID NO: 14061 - DNA, 21 bp, Homo sapiens
gaattcatttygcgctaatga

SEQ ID NO: 14062 - DNA, 21 bp, Homo sapiens
gaatggccctratgcagtcaa

SEQ ID NO: 14063 - DNA, 21 bp, Homo sapiens
ggatttccagrgtccggagct

SEQ ID NO: 14064 - DNA, 21 bp, Homo sapiens
ctttcctatayaacgcaagcc

SEQ ID NO: 14065 - DNA, 21 bp, Homo sapiens
ataaatagccycaaaagtcac

SEQ ID NO: 14066 - DNA, 21 bp, Homo sapiens
cattctttccmaatacgtgat

SEQ ID NO: 14067 - DNA, 21 bp, Homo sapiens
aattgacgctygtgtcactga

SEQ ID NO: 14068 - DNA, 21 bp, Homo sapiens
ctggcaggggyggtgtccgac

SEQ ID NO: 14069 - DNA, 21 bp, Homo sapiens
aaaccaggatscttcatgtgt

SEQ ID NO: 14070 - DNA, 21 bp, Homo sapiens
ctgcagtggtrtcgctttaga

SEQ ID NO: 14071 - DNA, 21 bp, Homo sapiens
tttatcatccktctacccaca

SEQ ID NO: 14072 - DNA, 21 bp, Homo sapiens
ggtggcttcastcagcagaac

SEQ ID NO: 14073 - DNA, 21 bp, Homo sapiens
gaatggagagstctttctcgg

SEQ ID NO: 14074 - DNA, 21 bp, Homo sapiens
ggagccacgtktgtataatga

SEQ ID NO: 14075 - DNA, 21 bp, Homo sapiens
aagctgctatscttgcaaagg

SEQ ID NO: 14076 - DNA, 21 bp, Homo sapiens
accttccaggkacatggaccc

SEQ ID NO: 14077 - DNA, 21 bp, Homo sapiens
ctcagttctgrtaactctttt

SEQ ID NO: 14078 - DNA, 21 bp, Homo sapiens
ctcagtgcctwagactttgaa

SEQ ID NO: 14079 - DNA, 21 bp, Homo sapiens
ataccttgtaycccaatgagt

SEQ ID NO: 14080 - DNA, 21 bp, Homo sapiens
aaaagcaggcraaatagaata

SEQ ID NO: 14081 - DNA, 21 bp, Homo sapiens
gcaaaaggatktccatttcta

SEQ ID NO: 14082 - DNA, 21 bp, Homo sapiens
gagctcatcaytaacatgcct

SEQ ID NO: 14083 - DNA, 21 bp, Homo sapiens
acatacacacraaaagtgcca

SEQ ID NO: 14084 - DNA, 21 bp, Homo sapiens
accatccaccrcaggcaaaca

SEQ ID NO: 14085 - DNA, 21 bp, Homo sapiens
tttcatccttyatctcccctg

SEQ ID NO: 14086 - DNA, 21 bp, Homo sapiens
tccttactctmcccaagtaat

SEQ ID NO: 14087 - DNA, 21 bp, Homo sapiens
cataaacgcayatggtcactt

SEQ ID NO: 14088 - DNA, 21 bp, Homo sapiens
gagtgtcccakctgggtttcc

SEQ ID NO: 14089 - DNA, 21 bp, Homo sapiens
caaggggtcaygcaggggact

SEQ ID NO: 14090 - DNA, 21 bp, Homo sapiens
agtggaaggtrtactccggct

SEQ ID NO: 14091 - DNA, 21 bp, Homo sapiens
cctgaattatyggagctcttg

SEQ ID NO: 14092 - DNA, 21 bp, Homo sapiens
catgcacgtgkttattcccag

SEQ ID NO: 14093 - DNA, 21 bp, Homo sapiens
gataatttttrtcatttcttt

SEQ ID NO: 14094 - DNA, 21 bp, Homo sapiens
caaaactggasctttcatgga

SEQ ID NO: 14095 - DNA, 21 bp, Homo sapiens
taagtgatgcrtcagaatttc

SEQ ID NO: 14096 - DNA, 21 bp, Homo sapiens
catggtctctsagcaggatta

SEQ ID NO: 14097 - DNA, 21 bp, Homo sapiens
gggagggaaaragacacaaat

SEQ ID NO: 14098 - DNA, 21 bp, Homo sapiens
agtcatgattsctctattccc

SEQ ID NO: 14099 - DNA, 21 bp, Homo sapiens
ggaatgggagsagtttaaaca

SEQ ID NO: 14100 - DNA, 21 bp, Homo sapiens
aagctgctgakgaattttaag

SEQ ID NO: 14101 - DNA, 21 bp, Homo sapiens
tgtctgcaatygatctgaaat

SEQ ID NO: 14102 - DNA, 21 bp, Homo sapiens
tcagtaattcyttcattctct

SEQ ID NO: 14103 - DNA, 21 bp, Homo sapiens
gagctgagccrcacttggaga

SEQ ID NO: 14104 - DNA, 21 bp, Homo sapiens
atcattatcastggccaaatc

SEQ ID NO: 14105 - DNA, 21 bp, Homo sapiens
tttctgtgtcraccaccattg

SEQ ID NO: 14106 - DNA, 21 bp, Homo sapiens
gaggaatcgastgtgacttta

SEQ ID NO: 14107 - DNA, 21 bp, Homo sapiens
tagggcatagyttgtggaatt

SEQ ID NO: 14108 - DNA, 21 bp, Homo sapiens
atctttgagtytgccgtcctc

SEQ ID NO: 14109 - DNA, 21 bp, Homo sapiens
atagtagcaayggtaactaat

SEQ ID NO: 14110 - DNA, 21 bp, Homo sapiens
agctatttccstaataccaag

SEQ ID NO: 14111 - DNA, 21 bp, Homo sapiens
caagcttcaartggataattc

SEQ ID NO: 14112 - DNA, 21 bp, Homo sapiens
gtaaatgcttrgtctttgatt

SEQ ID NO: 14113 - DNA, 21 bp, Homo sapiens
ttgatcagcawatgttattta

SEQ ID NO: 14114 - DNA, 21 bp, Homo sapiens
tctgctctaaygttggatcat

SEQ ID NO: 14115 - DNA, 21 bp, Homo sapiens
taagcaccttsccacaagctc

SEQ ID NO: 14116 - DNA, 21 bp, Homo sapiens
ataattgtttrtgtctacccc

SEQ ID NO: 14117 - DNA, 21 bp, Homo sapiens
agtgtggtttrtgtcaaaatc

SEQ ID NO: 14118 - DNA, 21 bp, Homo sapiens
ccagaaagtcscgagtgtttt

SEQ ID NO: 14119 - DNA, 21 bp, Homo sapiens
ggtggagagtrgctgagaaac

SEQ ID NO: 14120 - DNA, 21 bp, Homo sapiens
aaaaacacggragtaccattt

SEQ ID NO: 14121 - DNA, 21 bp, Homo sapiens
ggcaggaggcrttcatgggtc

SEQ ID NO: 14122 - DNA, 21 bp, Homo sapiens
cttcgaattgktgcactagag

SEQ ID NO: 14123 - DNA, 21 bp, Homo sapiens
tgctttcgtgrgcacagatga

SEQ ID NO: 14124 - DNA, 21 bp, Homo sapiens
gtcgttggcgrggagtgaatt

SEQ ID NO: 14125 - DNA, 21 bp, Homo sapiens
tgcaaaggagscttctctaaa

SEQ ID NO: 14126 - DNA, 21 bp, Homo sapiens
agtaggctctmacctggcagg

SEQ ID NO: 14127 - DNA, 21 bp, Homo sapiens
tgctgtcattygtgggttttg

SEQ ID NO: 14128 - DNA, 21 bp, Homo sapiens
agcattaataygtctggaaca

SEQ ID NO: 14129 - DNA, 21 bp, Homo sapiens
gtaaggtcccrtgacaattag

SEQ ID NO: 14130 - DNA, 21 bp, Homo sapiens
taaactgcagsgcgcacactc

SEQ ID NO: 14131 - DNA, 21 bp, Homo sapiens
aagctgcatcrtcttcctcct

SEQ ID NO: 14132 - DNA, 21 bp, Homo sapiens
atgcacgtttytacacatctg

SEQ ID NO: 14133 - DNA, 21 bp, Homo sapiens
ctctcgatgasctatgaacag

SEQ ID NO: 14134 - DNA, 21 bp, Homo sapiens
taggtgctacmtgaaagttta

SEQ ID NO: 14135 - DNA, 21 bp, Homo sapiens
ttcagactttmgcttagcaac

SEQ ID NO: 14136 - DNA, 21 bp, Homo sapiens
aatcaagcackcgagtatcct

SEQ ID NO: 14137 - DNA, 21 bp, Homo sapiens
agcccagtgcyaggtgctgaa

SEQ ID NO: 14138 - DNA, 21 bp, Homo sapiens
agttagacaaytagctcgccc

SEQ ID NO: 14139 - DNA, 21 bp, Homo sapiens
ccaacagtagrtctcgacagt

SEQ ID NO: 14140 - DNA, 21 bp, Homo sapiens
tcaaaggttgsgcacattttt

SEQ ID NO: 14141 - DNA, 21 bp, Homo sapiens
gttcaggcggyattaaccccc

SEQ ID NO: 14142 - DNA, 21 bp, Homo sapiens
ctttataaaartataaaccaa

SEQ ID NO: 14143 - DNA, 21 bp, Homo sapiens
cctggtgcatscttctagaca

SEQ ID NO: 14144 - DNA, 21 bp, Homo sapiens
atttgccaagktttgaaaagt

SEQ ID NO: 14145 - DNA, 21 bp, Homo sapiens
gtacattcacrtcctggtaat

SEQ ID NO: 14146 - DNA, 21 bp, Homo sapiens
tcagatgattkggaggtagtc

SEQ ID NO: 14147 - DNA, 21 bp, Homo sapiens
tcttcctgctrtggccataga

SEQ ID NO: 14148 - DNA, 21 bp, Homo sapiens
tccttttcccrtaattttatg

SEQ ID NO: 14149 - DNA, 21 bp, Homo sapiens
gtccttgatcrtttttcttgg

SEQ ID NO: 14150 - DNA, 21 bp, Homo sapiens
aaaactgataytaattctgtt

SEQ ID NO: 14151 - DNA, 21 bp, Homo sapiens
tattttcaccmcggaaattgg

SEQ ID NO: 14152 - DNA, 21 bp, Homo sapiens
ggaaaaaccckacttttgact

SEQ ID NO: 14153 - DNA, 21 bp, Homo sapiens
tttcccatctstgaggcttct

SEQ ID NO: 14154 - DNA, 21 bp, Homo sapiens
ttccaacttcyacatatatct

SEQ ID NO: 14155 - DNA, 21 bp, Homo sapiens
gcgtaggccasttggagtgag

SEQ ID NO: 14156 - DNA, 21 bp, Homo sapiens
gtaaccaataycgctccttct

SEQ ID NO: 14157 - DNA, 21 bp, Homo sapiens
ggaatgcaggyggaacaggct

SEQ ID NO: 14158 - DNA, 21 bp, Homo sapiens
attttcaatastggcccctca

SEQ ID NO: 14159 - DNA, 21 bp, Homo sapiens
ggcccttgttstagaagaatg

SEQ ID NO: 14160 - DNA, 21 bp, Homo sapiens
aagtaaatatkccttaaaagt

SEQ ID NO: 14161 - DNA, 21 bp, Homo sapiens
ttttgatgtayagacatccct

SEQ ID NO: 14162 - DNA, 21 bp, Homo sapiens
ggctctaaggmggaatttact

SEQ ID NO: 14163 - DNA, 21 bp, Homo sapiens
gtagttacaaygctagtgacc

SEQ ID NO: 14164 - DNA, 21 bp, Homo sapiens
catacgggcartagtccgcat

SEQ ID NO: 14165 - DNA, 21 bp, Homo sapiens
aaattagcaargaagcaaata

SEQ ID NO: 14166 - DNA, 21 bp, Homo sapiens
tgtgatgtgtyagaaagcaca

SEQ ID NO: 14167 - DNA, 21 bp, Homo sapiens
tagcgacagawaattacaaca

SEQ ID NO: 14168 - DNA, 21 bp, Homo sapiens
tgtatgtttgsggtacaactc

SEQ ID NO: 14169 - DNA, 21 bp, Homo sapiens
tgaagtgcttstcagtgatga

SEQ ID NO: 14170 - DNA, 21 bp, Homo sapiens
tttgtaaggcraaaagacccc

SEQ ID NO: 14171 - DNA, 21 bp, Homo sapiens
gagaggtactsttagcaaatc

SEQ ID NO: 14172 - DNA, 21 bp, Homo sapiens
atgtatgtgayttaatagcgt

SEQ ID NO: 14173 - DNA, 21 bp, Homo sapiens
tttaacaaaarccttctgggc

SEQ ID NO: 14174 - DNA, 21 bp, Homo sapiens
agaaatgagartgaggataaa

SEQ ID NO: 14175 - DNA, 21 bp, Homo sapiens
tcccatgcacrgggagtcaag

SEQ ID NO: 14176 - DNA, 21 bp, Homo sapiens
actggcacgamagttcagtca

SEQ ID NO: 14177 - DNA, 21 bp, Homo sapiens
catagggtatytccagataat

SEQ ID NO: 14178 - DNA, 21 bp, Homo sapiens
agtgtagctcyaatgtgagtt

SEQ ID NO: 14179 - DNA, 21 bp, Homo sapiens
gcaaatgtgtsaggaattata

SEQ ID NO: 14180 - DNA, 21 bp, Homo sapiens
cctgctttttrtagacatgtc

SEQ ID NO: 14181 - DNA, 21 bp, Homo sapiens
ggagcaacctmactagagaca

SEQ ID NO: 14182 - DNA, 21 bp, Homo sapiens
agcagctattragcctcacac

SEQ ID NO: 14183 - DNA, 21 bp, Homo sapiens
tctagtctatkggcatcaagt

SEQ ID NO: 14184 - DNA, 21 bp, Homo sapiens
cgcacctacaygcgtgggaac

SEQ ID NO: 14185 - DNA, 21 bp, Homo sapiens
gagtcaatatkcatttgtatt

SEQ ID NO: 14186 - DNA, 21 bp, Homo sapiens
atttccattakacttgagcca

SEQ ID NO: 14187 - DNA, 21 bp, Homo sapiens
aataagagcaktcacaacaga

SEQ ID NO: 14188 - DNA, 21 bp, Homo sapiens
ggacaccatgmtttccagccc

SEQ ID NO: 14189 - DNA, 21 bp, Homo sapiens
gcaagacggaraaaatgcttc

SEQ ID NO: 14190 - DNA, 21 bp, Homo sapiens
tttggtggaartgaaagtaaa

SEQ ID NO: 14191 - DNA, 21 bp, Homo sapiens
gtaaccccatwgtaagttgag

SEQ ID NO: 14192 - DNA, 21 bp, Homo sapiens
tggaaattcaragtgagtcta

SEQ ID NO: 14193 - DNA, 21 bp, Homo sapiens
tgccctgctgmatcttaggcg

SEQ ID NO: 14194 - DNA, 21 bp, Homo sapiens
ttcaaactaartaaattattt

SEQ ID NO: 14195 - DNA, 21 bp, Homo sapiens
gcagatctctsggcagaaacc

SEQ ID NO: 14196 - DNA, 21 bp, Homo sapiens
tgaggggccargatgggcttt

SEQ ID NO: 14197 - DNA, 21 bp, Homo sapiens
tgaatccttcrttcttaagag

SEQ ID NO: 14198 - DNA, 21 bp, Homo sapiens
ccctcacctgytactcacctc

SEQ ID NO: 14199 - DNA, 21 bp, Homo sapiens
ctaagcatcamtggctaatca

SEQ ID NO: 14200 - DNA, 21 bp, Homo sapiens
ggaagacagaracacatccag

SEQ ID NO: 14201 - DNA, 21 bp, Homo sapiens
ttcttaaactmtgatctatcc

SEQ ID NO: 14202 - DNA, 21 bp, Homo sapiens
ttggatccagsagtcttatgt

SEQ ID NO: 14203 - DNA, 21 bp, Homo sapiens
aagtcaccatytggctatctt

SEQ ID NO: 14204 - DNA, 21 bp, Homo sapiens
agaaaatagcyattgcctgta

SEQ ID NO: 14205 - DNA, 21 bp, Homo sapiens
tttttggcacktggctcttta

SEQ ID NO: 14206 - DNA, 21 bp, Homo sapiens
tttaaaaaaawtttttttgta

SEQ ID NO: 14207 - DNA, 21 bp, Homo sapiens
ttcatcttggkctccactgag

SEQ ID NO: 14208 - DNA, 21 bp, Homo sapiens
gcaaactacascagatgaact

SEQ ID NO: 14209 - DNA, 21 bp, Homo sapiens
gatgactgatragacgtcccc

SEQ ID NO: 14210 - DNA, 21 bp, Homo sapiens
attttgcccaratgttatcag

SEQ ID NO: 14211 - DNA, 21 bp, Homo sapiens
cgaatcctccrtgacttacct

SEQ ID NO: 14212 - DNA, 21 bp, Homo sapiens
cagtggggtgraaggagctgg

SEQ ID NO: 14213 - DNA, 21 bp, Homo sapiens
ggaggtgtgasaatggcaatt

SEQ ID NO: 14214 - DNA, 21 bp, Homo sapiens
aatcttagtcmaagtgtcttt

SEQ ID NO: 14215 - DNA, 21 bp, Homo sapiens
tgcataaatgraagtcattat

SEQ ID NO: 14216 - DNA, 21 bp, Homo sapiens
ggttgtggcartgactgacct

SEQ ID NO: 14217 - DNA, 21 bp, Homo sapiens
gaagcctagarcaacaaagtt

SEQ ID NO: 14218 - DNA, 21 bp, Homo sapiens
tcgtctcagcytgagggttat

SEQ ID NO: 14219 - DNA, 21 bp, Homo sapiens
aatgaatgcaytggtttcatt

SEQ ID NO: 14220 - DNA, 21 bp, Homo sapiens
tccatctctaytgctaaggaa

SEQ ID NO: 14221 - DNA, 21 bp, Homo sapiens
gactcgaaaarggcatttaaa

SEQ ID NO: 14222 - DNA, 21 bp, Homo sapiens
aaacattctgycccattgtca

SEQ ID NO: 14223 - DNA, 21 bp, Homo sapiens
aatttgagacmacttttctgt

SEQ ID NO: 14224 - DNA, 21 bp, Homo sapiens
atacggggctygcccgggaca

SEQ ID NO: 14225 - DNA, 21 bp, Homo sapiens
gaggttggacrgaagatgtgc

SEQ ID NO: 14226 - DNA, 21 bp, Homo sapiens
gagtttcatcraaggcatgtt

SEQ ID NO: 14227 - DNA, 21 bp, Homo sapiens
tagtagtgatkgatggcagaa

SEQ ID NO: 14228 - DNA, 21 bp, Homo sapiens
ggggaaatctkggcactatga

SEQ ID NO: 14229 - DNA, 21 bp, Homo sapiens
atctttaacakgtgaaacaac

SEQ ID NO: 14230 - DNA, 21 bp, Homo sapiens
ttgagatacartaataatcaa

SEQ ID NO: 14231 - DNA, 21 bp, Homo sapiens
tggccatatgrttatcatgac

SEQ ID NO: 14232 - DNA, 21 bp, Homo sapiens
tttcccataartcatacgggc

SEQ ID NO: 14233 - DNA, 21 bp, Homo sapiens
cagattcccartctctacccc

SEQ ID NO: 14234 - DNA, 21 bp, Homo sapiens
gacctcactcmcatgggcaaa

SEQ ID NO: 14235 - DNA, 21 bp, Homo sapiens
ggctaccttgsgtcagtcact

SEQ ID NO: 14236 - DNA, 21 bp, Homo sapiens
gtctcacttgmtctttcttag

SEQ ID NO: 14237 - DNA, 21 bp, Homo sapiens
aaattattaasaatgtcaagg

SEQ ID NO: 14238 - DNA, 21 bp, Homo sapiens
atccttttttmtgctaagcca

SEQ ID NO: 14239 - DNA, 21 bp, Homo sapiens
ttcaagctgcktttgtggatt

SEQ ID NO: 14240 - DNA, 21 bp, Homo sapiens
atgttggcatytgctgttatt

SEQ ID NO: 14241 - DNA, 21 bp, Homo sapiens
agaactagccyttttgattcc

SEQ ID NO: 14242 - DNA, 21 bp, Homo sapiens
tttgggaccayagcatgcttt

SEQ ID NO: 14243 - DNA, 21 bp, Homo sapiens
taccctttackataaaaaaat

SEQ ID NO: 14244 - DNA, 21 bp, Homo sapiens
tccagaaggtstgcttttctc

SEQ ID NO: 14245 - DNA, 21 bp, Homo sapiens
ccgcctccgcsacattttgca

SEQ ID NO: 14246 - DNA, 21 bp, Homo sapiens
ccgcttgcatyggtgataagg

SEQ ID NO: 14247 - DNA, 21 bp, Homo sapiens
taggtttcacmtccaactctg

SEQ ID NO: 14248 - DNA, 21 bp, Homo sapiens
tggacaccaamaaagtaggag

SEQ ID NO: 14249 - DNA, 21 bp, Homo sapiens
ctgacagcccytggcgcaaca

SEQ ID NO: 14250 - DNA, 21 bp, Homo sapiens
caggagagttyggtgcatatg

SEQ ID NO: 14251 - DNA, 21 bp, Homo sapiens
cctgccaaagrgttctagttt

SEQ ID NO: 14252 - DNA, 21 bp, Homo sapiens
gacagtcagaygggcactcct

SEQ ID NO: 14253 - DNA, 21 bp, Homo sapiens
aggaagacccwgttcttcact

SEQ ID NO: 14254 - DNA, 21 bp, Homo sapiens
tacacattccygttttctggg

SEQ ID NO: 14255 - DNA, 21 bp, Homo sapiens
tgttgcttgtrttagtgctaa

SEQ ID NO: 14256 - DNA, 21 bp, Homo sapiens
catacagcatraagaacagac

SEQ ID NO: 14257 - DNA, 21 bp, Homo sapiens
tattgcaaacsccggacatga

SEQ ID NO: 14258 - DNA, 21 bp, Homo sapiens
aggcatttatrtcaattttat

SEQ ID NO: 14259 - DNA, 21 bp, Homo sapiens
gtgggacggastgatcctagc

SEQ ID NO: 14260 - DNA, 21 bp, Homo sapiens
cacagggctgsgctcagggca

SEQ ID NO: 14261 - DNA, 21 bp, Homo sapiens
ttgtagcttascagccgttca

SEQ ID NO: 14262 - DNA, 21 bp, Homo sapiens
tcctggcaaasctgtcagttg

SEQ ID NO: 14263 - DNA, 21 bp, Homo sapiens
gagccagatgscctgtacctc

SEQ ID NO: 14264 - DNA, 21 bp, Homo sapiens
tatgaacaacracaaaattta

SEQ ID NO: 14265 - DNA, 21 bp, Homo sapiens
gaagtgttccrcggagtccac

SEQ ID NO: 14266 - DNA, 21 bp, Homo sapiens
tcctgtttatytatattaggt

SEQ ID NO: 14267 - DNA, 21 bp, Homo sapiens
accagctgcakattgctggag

SEQ ID NO: 14268 - DNA, 21 bp, Homo sapiens
gtcctttcaakgatgtctcta

SEQ ID NO: 14269 - DNA, 21 bp, Homo sapiens
tggactctatrgacctaaacc

SEQ ID NO: 14270 - DNA, 21 bp, Homo sapiens
atgcccaagawccctcagcta

SEQ ID NO: 14271 - DNA, 21 bp, Homo sapiens
gcatgccatgstcttcatgga

SEQ ID NO: 14272 - DNA, 21 bp, Homo sapiens
tggctcaaatrtaaaagattt

SEQ ID NO: 14273 - DNA, 21 bp, Homo sapiens
ctatcttgcasgatcctagtg

SEQ ID NO: 14274 - DNA, 21 bp, Homo sapiens
cttggacaccrtgtgaaggta

SEQ ID NO: 14275 - DNA, 21 bp, Homo sapiens
ttttgattaamaatttgactt

SEQ ID NO: 14276 - DNA, 21 bp, Homo sapiens
ggagagcactstgagtccctc

SEQ ID NO: 14277 - DNA, 21 bp, Homo sapiens
cctgcattaakcttcttttat

SEQ ID NO: 14278 - DNA, 21 bp, Homo sapiens
gtttcgtggtrtcagtttcca

SEQ ID NO: 14279 - DNA, 21 bp, Homo sapiens
gcctaaaaatrtaggtgagat

SEQ ID NO: 14280 - DNA, 21 bp, Homo sapiens
accagtaggasccctggtgct

SEQ ID NO: 14281 - DNA, 21 bp, Homo sapiens
agtgagttctsattgttggtt

SEQ ID NO: 14282 - DNA, 21 bp, Homo sapiens
tgttactagasattctggttt

SEQ ID NO: 14283 - DNA, 21 bp, Homo sapiens
aaagggctgasttagttttca

SEQ ID NO: 14284 - DNA, 21 bp, Homo sapiens
tgacagtctastttgcagttg

SEQ ID NO: 14285 - DNA, 21 bp, Homo sapiens
aaaagtgaaamctcagaagga

SEQ ID NO: 14286 - DNA, 21 bp, Homo sapiens
gttttctccayctccaaacac

SEQ ID NO: 14287 - DNA, 21 bp, Homo sapiens
cttacagatgkgctcattaaa

SEQ ID NO: 14288 - DNA, 21 bp, Homo sapiens
tcctgctgtgyggcctggctc

SEQ ID NO: 14289 - DNA, 21 bp, Homo sapiens
tgagttcataktaggttgtga

SEQ ID NO: 14290 - DNA, 21 bp, Homo sapiens
tgcttctctcyccagttaccc

SEQ ID NO: 14291 - DNA, 21 bp, Homo sapiens
ctgtacggccyaagtttgggg

SEQ ID NO: 14292 - DNA, 21 bp, Homo sapiens
cctcattttaygctccccaaa

SEQ ID NO: 14293 - DNA, 21 bp, Homo sapiens
gagcatctttmaaacacactg

SEQ ID NO: 14294 - DNA, 21 bp, Homo sapiens
ggacttgaccyccccatccat

SEQ ID NO: 14295 - DNA, 21 bp, Homo sapiens
ctattgacatmtagtgggtag

SEQ ID NO: 14296 - DNA, 21 bp, Homo sapiens
gggctcagtgyatgctgagca

SEQ ID NO: 14297 - DNA, 21 bp, Homo sapiens
ccactgaacarctttcattgt

SEQ ID NO: 14298 - DNA, 21 bp, Homo sapiens
agaggcgggcsccataagaga

SEQ ID NO: 14299 - DNA, 21 bp, Homo sapiens
tctttttaggygccttataaa

SEQ ID NO: 14300 - DNA, 21 bp, Homo sapiens
gacctcgaaaycttggtggct

SEQ ID NO: 14301 - DNA, 21 bp, Homo sapiens
gttcagataargggccagttg

SEQ ID NO: 14302 - DNA, 21 bp, Homo sapiens
ttcatgtgttktcttagcatt

SEQ ID NO: 14303 - DNA, 21 bp, Homo sapiens
ctgtggtgaaytacaccgaca

SEQ ID NO: 14304 - DNA, 21 bp, Homo sapiens
ggtgtgctggycaggtaaggg

SEQ ID NO: 14305 - DNA, 21 bp, Homo sapiens
cggaagggaaratgatagaca

SEQ ID NO: 14306 - DNA, 21 bp, Homo sapiens
atggcagcaasatctacccca

SEQ ID NO: 14307 - DNA, 21 bp, Homo sapiens
accaactctgyatggctgttg

SEQ ID NO: 14308 - DNA, 21 bp, Homo sapiens
tgcttgtccayctgccatatc

SEQ ID NO: 14309 - DNA, 21 bp, Homo sapiens
ctgacccccasctcaacaccc

SEQ ID NO: 14310 - DNA, 21 bp, Homo sapiens
tgctgaaatcmtatccagaca

SEQ ID NO: 14311 - DNA, 21 bp, Homo sapiens
gaatgctaacytgtgttttcc

SEQ ID NO: 14312 - DNA, 21 bp, Homo sapiens
ttgaggaattytacgtttgat

SEQ ID NO: 14313 - DNA, 21 bp, Homo sapiens
ttctttaaagytactattcat

SEQ ID NO: 14314 - DNA, 21 bp, Homo sapiens
tggaaacatgrgctgggtctc

SEQ ID NO: 14315 - DNA, 21 bp, Homo sapiens
gagacatcctmagattaacaa

SEQ ID NO: 14316 - DNA, 21 bp, Homo sapiens
cttaaagataytgtcgtgtcc

SEQ ID NO: 14317 - DNA, 21 bp, Homo sapiens
atacttatgtstaaatttatt

SEQ ID NO: 14318 - DNA, 21 bp, Homo sapiens
ctcttttcttrtacccagcca

SEQ ID NO: 14319 - DNA, 21 bp, Homo sapiens
tttattattayaattgctcct

SEQ ID NO: 14320 - DNA, 21 bp, Homo sapiens
atgagcaaaawtatttcatgg

SEQ ID NO: 14321 - DNA, 21 bp, Homo sapiens
tctgcatgcaygcagcaaaca

SEQ ID NO: 14322 - DNA, 21 bp, Homo sapiens
gattcctacarttgtcctgaa

SEQ ID NO: 14323 - DNA, 21 bp, Homo sapiens
aaactaggtasagcaaattta

SEQ ID NO: 14324 - DNA, 21 bp, Homo sapiens
attgctaaagrtaagacagca

SEQ ID NO: 14325 - DNA, 21 bp, Homo sapiens
gccatttatcyccagggacaa

SEQ ID NO: 14326 - DNA, 21 bp, Homo sapiens
ctattaccaamagaagactac

SEQ ID NO: 14327 - DNA, 21 bp, Homo sapiens
ctctcttttcyaacctaattt

SEQ ID NO: 14328 - DNA, 21 bp, Homo sapiens
gggtgacctayggtttatttt

SEQ ID NO: 14329 - DNA, 21 bp, Homo sapiens
aaacccagcckaggcagaagg

SEQ ID NO: 14330 - DNA, 21 bp, Homo sapiens
tctgtgtgtaygtttcacctt

SEQ ID NO: 14331 - DNA, 21 bp, Homo sapiens
gggtggtggtsgtgggggggt

SEQ ID NO: 14332 - DNA, 21 bp, Homo sapiens
ggaacatgaaraatgtcccaa

SEQ ID NO: 14333 - DNA, 21 bp, Homo sapiens
taagcagtcaygaagagcacg

SEQ ID NO: 14334 - DNA, 21 bp, Homo sapiens
ctctttgcagktcccagatgt

SEQ ID NO: 14335 - DNA, 21 bp, Homo sapiens
caagctctgcygactgaaatg

SEQ ID NO: 14336 - DNA, 21 bp, Homo sapiens
tccaggatctyaaacgaacaa

SEQ ID NO: 14337 - DNA, 21 bp, Homo sapiens
gaaggccagcstccacgagcc

SEQ ID NO: 14338 - DNA, 21 bp, Homo sapiens
cagcatacctrtatcatatct

SEQ ID NO: 14339 - DNA, 21 bp, Homo sapiens
attagtaacaygttgtcggtt

SEQ ID NO: 14340 - DNA, 21 bp, Homo sapiens
tgcaggggttsgggggcaggc

SEQ ID NO: 14341 - DNA, 21 bp, Homo sapiens
ctttgagagcytcctcccatt

SEQ ID NO: 14342 - DNA, 21 bp, Homo sapiens
cgggttcctcytgaatcttcc

SEQ ID NO: 14343 - DNA, 21 bp, Homo sapiens
gtgggcctatyatgcacttaa

SEQ ID NO: 14344 - DNA, 21 bp, Homo sapiens
ttcagtcctcrtgcatctttt

SEQ ID NO: 14345 - DNA, 21 bp, Homo sapiens
taaaatcagcrgggtactctt

SEQ ID NO: 14346 - DNA, 21 bp, Homo sapiens
ggtgagggccrcctggtgagg

SEQ ID NO: 14347 - DNA, 21 bp, Homo sapiens
taaacaatgtygggatggaca

SEQ ID NO: 14348 - DNA, 21 bp, Homo sapiens
gcttacaggcwgctgtggagg

SEQ ID NO: 14349 - DNA, 21 bp, Homo sapiens
cgcatgacatkggactgttcc

SEQ ID NO: 14350 - DNA, 21 bp, Homo sapiens
tcccgccccaygcctgcaaga

SEQ ID NO: 14351 - DNA, 21 bp, Homo sapiens
accccattccrgatcaattat

SEQ ID NO: 14352 - DNA, 21 bp, Homo sapiens
gggttcctgaraattatggac

SEQ ID NO: 14353 - DNA, 21 bp, Homo sapiens
ctgtccagttrcttcgtgtca

SEQ ID NO: 14354 - DNA, 21 bp, Homo sapiens
ctcagtggcaygtgcttctcc

SEQ ID NO: 14355 - DNA, 21 bp, Homo sapiens
tctgcacagtyctacccatgg

SEQ ID NO: 14356 - DNA, 21 bp, Homo sapiens
cggtccctgcmctgatgtgta

SEQ ID NO: 14357 - DNA, 21 bp, Homo sapiens
cctagatttcyaaaagggtct

SEQ ID NO: 14358 - DNA, 21 bp, Homo sapiens
cagtgagctcrtttccatctg

SEQ ID NO: 14359 - DNA, 21 bp, Homo sapiens
cattgagtgtygggcccaata

SEQ ID NO: 14360 - DNA, 21 bp, Homo sapiens
cattccaacartggaacgcta

SEQ ID NO: 14361 - DNA, 21 bp, Homo sapiens
caggccagacrtttggttcag

SEQ ID NO: 14362 - DNA, 21 bp, Homo sapiens
agggaggtaamcctgcctccc

SEQ ID NO: 14363 - DNA, 21 bp, Homo sapiens
tgtttcaagckgccccctgtc

SEQ ID NO: 14364 - DNA, 21 bp, Homo sapiens
tgctcggcacygttctagcca

SEQ ID NO: 14365 - DNA, 21 bp, Homo sapiens
ccactcacccraagcatgcga

SEQ ID NO: 14366 - DNA, 21 bp, Homo sapiens
ggtagctgtgrcattggtctc

SEQ ID NO: 14367 - DNA, 21 bp, Homo sapiens
ggcctctgatyccaggccctc

SEQ ID NO: 14368 - DNA, 21 bp, Homo sapiens
ccacgcgaccktcctggtagc

SEQ ID NO: 14369 - DNA, 21 bp, Homo sapiens
tcaattctgcycagccacttg

SEQ ID NO: 14370 - DNA, 21 bp, Homo sapiens
ggtttcctccytccctgatga

SEQ ID NO: 14371 - DNA, 21 bp, Homo sapiens
gaaggcaccarggtttatatt

SEQ ID NO: 14372 - DNA, 21 bp, Homo sapiens
ctgtgtgactstagtgtcatt

SEQ ID NO: 14373 - DNA, 21 bp, Homo sapiens
ggcaacagcgyccagggccca

SEQ ID NO: 14374 - DNA, 21 bp, Homo sapiens
tctgaatgagrccccaaaaga

SEQ ID NO: 14375 - DNA, 21 bp, Homo sapiens
gcgggtgagayagattgttcc

SEQ ID NO: 14376 - DNA, 21 bp, Homo sapiens
aggccggatcrcaactcctta

SEQ ID NO: 14377 - DNA, 21 bp, Homo sapiens
gcagtggcccstgggtatctc

SEQ ID NO: 14378 - DNA, 21 bp, Homo sapiens
gtggtacagcygtgattccca

SEQ ID NO: 14379 - DNA, 21 bp, Homo sapiens
tctccagctayaccaagcaca

SEQ ID NO: 14380 - DNA, 21 bp, Homo sapiens
acagatagaargtaatcatta

SEQ ID NO: 14381 - DNA, 21 bp, Homo sapiens
acttgtccggygccccaagca

SEQ ID NO: 14382 - DNA, 21 bp, Homo sapiens
tacacttactrtgtaccaacc

SEQ ID NO: 14383 - DNA, 21 bp, Homo sapiens
tctctcccggkagtccccgct

SEQ ID NO: 14384 - DNA, 21 bp, Homo sapiens
acatccccttygagcaggtag

SEQ ID NO: 14385 - DNA, 21 bp, Homo sapiens
gatgttgcctrttgatgccct

SEQ ID NO: 14386 - DNA, 21 bp, Homo sapiens
tgttcctctcrccctgttact

SEQ ID NO: 14387 - DNA, 21 bp, Homo sapiens
caggcagatcrgggttcctgg

SEQ ID NO: 14388 - DNA, 21 bp, Homo sapiens
tttcaaaaaaycaagtcttaa

SEQ ID NO: 14389 - DNA, 21 bp, Homo sapiens
ctctgacactytgaggcccgt

SEQ ID NO: 14390 - DNA, 21 bp, Homo sapiens
cactggtcagrtgattcactg

SEQ ID NO: 14391 - DNA, 21 bp, Homo sapiens
cactccagccrccattctagt

SEQ ID NO: 14392 - DNA, 21 bp, Homo sapiens
agatagaaatyagagtgatgt

SEQ ID NO: 14393 - DNA, 21 bp, Homo sapiens
aggccttggaygcagtatgac

SEQ ID NO: 14394 - DNA, 21 bp, Homo sapiens
gttagaaactsttaactgcag

SEQ ID NO: 14395 - DNA, 21 bp, Homo sapiens
aaggcacagcrtcaatggccc

SEQ ID NO: 14396 - DNA, 21 bp, Homo sapiens
gatttttgagkaacagccatg

SEQ ID NO: 14397 - DNA, 21 bp, Homo sapiens
atcctctcgcrcccgtacagc

SEQ ID NO: 14398 - DNA, 21 bp, Homo sapiens
ggcccacctcrgcagaggcca

SEQ ID NO: 14399 - DNA, 21 bp, Homo sapiens
aacatgcagarggaattgtac

SEQ ID NO: 14400 - DNA, 21 bp, Homo sapiens
tcttaacctcytcgggtgagt

SEQ ID NO: 14401 - DNA, 21 bp, Homo sapiens
gcaaattaccyttgcaagcag

SEQ ID NO: 14402 - DNA, 21 bp, Homo sapiens
catcttggcakggccctaacc

SEQ ID NO: 14403 - DNA, 21 bp, Homo sapiens
aagcccaggamtcgacccaca

SEQ ID NO: 14404 - DNA, 21 bp, Homo sapiens
ccgcgataacyaccattctga

SEQ ID NO: 14405 - DNA, 21 bp, Homo sapiens
ggactcagaaytcggtggata

SEQ ID NO: 14406 - DNA, 21 bp, Homo sapiens
ttctcttcagrggactggctc

SEQ ID NO: 14407 - DNA, 21 bp, Homo sapiens
ccaagtggccsttgggaacag

SEQ ID NO: 14408 - DNA, 21 bp, Homo sapiens
cagtagggccwtctgacagcc

SEQ ID NO: 14409 - DNA, 21 bp, Homo sapiens
tttcccattayccccactacc

SEQ ID NO: 14410 - DNA, 21 bp, Homo sapiens
aggttgtcccrtctgcccaag

SEQ ID NO: 14411 - DNA, 21 bp, Homo sapiens
ctattacggtyaacaactctg

SEQ ID NO: 14412 - DNA, 21 bp, Homo sapiens
actaagccatmtgcttcgtgt

SEQ ID NO: 14413 - DNA, 21 bp, Homo sapiens
aaacaaagaargagcaggcct

SEQ ID NO: 14414 - DNA, 21 bp, Homo sapiens
tcggagtctcygtgtggtccc

SEQ ID NO: 14415 - DNA, 21 bp, Homo sapiens
tgggtcagacmaggtcttgcc

SEQ ID NO: 14416 - DNA, 21 bp, Homo sapiens
cttaatgtccrgctcatgtcc

SEQ ID NO: 14417 - DNA, 21 bp, Homo sapiens
ccagacccagrgtcattagcc

SEQ ID NO: 14418 - DNA, 21 bp, Homo sapiens
aattggatggytgtctatact

SEQ ID NO: 14419 - DNA, 21 bp, Homo sapiens
tctttagtagwtggatcgctg

SEQ ID NO: 14420 - DNA, 21 bp, Homo sapiens
agtagtctacrgagcatctgt

SEQ ID NO: 14421 - DNA, 21 bp, Homo sapiens
tgccatttttwgtgcagcaga

SEQ ID NO: 14422 - DNA, 21 bp, Homo sapiens
ctgaggcacaragagggggta

SEQ ID NO: 14423 - DNA, 21 bp, Homo sapiens
cgatttaaagraactacaatt

SEQ ID NO: 14424 - DNA, 21 bp, Homo sapiens
gtcttttcacygccagagccc

SEQ ID NO: 14425 - DNA, 21 bp, Homo sapiens
tgtcagcatcrttaattgggg

SEQ ID NO: 14426 - DNA, 21 bp, Homo sapiens
ttcccctttcyggttaaacag

SEQ ID NO: 14427 - DNA, 21 bp, Homo sapiens
gccatgagggscccgccccag

SEQ ID NO: 14428 - DNA, 21 bp, Homo sapiens
gggaggatccmaaagaccaac

SEQ ID NO: 14429 - DNA, 21 bp, Homo sapiens
aagactgtcargtctgaaggc

SEQ ID NO: 14430 - DNA, 21 bp, Homo sapiens
ctacaatgtcrtcctaatcta

SEQ ID NO: 14431 - DNA, 21 bp, Homo sapiens
aggggatggcytttaatgtat

SEQ ID NO: 14432 - DNA, 21 bp, Homo sapiens
tgaaagaacaygaccaccttc

SEQ ID NO: 14433 - DNA, 21 bp, Homo sapiens
ttttcctatarggtggataag

SEQ ID NO: 14434 - DNA, 21 bp, Homo sapiens
accacacgtcycaactcatgg

SEQ ID NO: 14435 - DNA, 21 bp, Homo sapiens
ggagttagttyacaagatgca

SEQ ID NO: 14436 - DNA, 21 bp, Homo sapiens
attgctttacygagcatttgt

SEQ ID NO: 14437 - DNA, 21 bp, Homo sapiens
cctataggtcyatccttacac

SEQ ID NO: 14438 - DNA, 21 bp, Homo sapiens
taatcaaagtmtttggcaagc

SEQ ID NO: 14439 - DNA, 21 bp, Homo sapiens
gaggttctgcrggggcagcta

SEQ ID NO: 14440 - DNA, 21 bp, Homo sapiens
gagtgacaacrtcatcaatta

SEQ ID NO: 14441 - DNA, 21 bp, Homo sapiens
tattttttgawgggaaatgag

SEQ ID NO: 14442 - DNA, 21 bp, Homo sapiens
ataatacaaaraaatctcatg

SEQ ID NO: 14443 - DNA, 21 bp, Homo sapiens
cttcgtgcccrtcccagtcag

SEQ ID NO: 14444 - DNA, 21 bp, Homo sapiens
acacggcatcrcacccagtcc

SEQ ID NO: 14445 - DNA, 21 bp, Homo sapiens
ctttccaggarggtgtgtatt

SEQ ID NO: 14446 - DNA, 21 bp, Homo sapiens
tcttcttaacyttctcgggtg

SEQ ID NO: 14447 - DNA, 21 bp, Homo sapiens
aacacattagrtccaaattag

SEQ ID NO: 14448 - DNA, 21 bp, Homo sapiens
agacaaatgcraggcagaggc

SEQ ID NO: 14449 - DNA, 21 bp, Homo sapiens
ctctcagcctwggtttcttca

SEQ ID NO: 14450 - DNA, 21 bp, Homo sapiens
ttggaaagcastgaaacccag

SEQ ID NO: 14451 - DNA, 21 bp, Homo sapiens
tatgtaagtgrtttctcaggg

SEQ ID NO: 14452 - DNA, 21 bp, Homo sapiens
ccatggactgsctggggtgtc

SEQ ID NO: 14453 - DNA, 21 bp, Homo sapiens
atgtgcagtarggccatctga

SEQ ID NO: 14454 - DNA, 21 bp, Homo sapiens
ggtccttctgwaaaagggcca

SEQ ID NO: 14455 - DNA, 21 bp, Homo sapiens
taatcaatgcrgaatctcccc

SEQ ID NO: 14456 - DNA, 21 bp, Homo sapiens
tggacagtggrggtcactgcc

SEQ ID NO: 14457 - DNA, 21 bp, Homo sapiens
aagctggaaamgtggctcgtg

SEQ ID NO: 14458 - DNA, 21 bp, Homo sapiens
tgcccgaccaytatgaatgcc

SEQ ID NO: 14459 - DNA, 21 bp, Homo sapiens
catgaagagcratttcttcag

SEQ ID NO: 14460 - DNA, 21 bp, Homo sapiens
gtgtaagtttkggaatccctg

SEQ ID NO: 14461 - DNA, 21 bp, Homo sapiens
ggcttggctcrgctcgcggat

SEQ ID NO: 14462 - DNA, 21 bp, Homo sapiens
cattttcacayggcctgatag

SEQ ID NO: 14463 - DNA, 21 bp, Homo sapiens
ccacagctcayaggtcccctc

SEQ ID NO: 14464 - DNA, 21 bp, Homo sapiens
agcgctggacrtcacagaagt

SEQ ID NO: 14465 - DNA, 21 bp, Homo sapiens
cagtaggactyttgaagtcac

SEQ ID NO: 14466 - DNA, 21 bp, Homo sapiens
tccaagaaaayctgacttgaa

SEQ ID NO: 14467 - DNA, 21 bp, Homo sapiens
cacccccaggwtctcttgctc

SEQ ID NO: 14468 - DNA, 21 bp, Homo sapiens
ccagagattcyggagacttct

SEQ ID NO: 14469 - DNA, 21 bp, Homo sapiens
ttcctcttatmttcttcctcc

SEQ ID NO: 14470 - DNA, 21 bp, Homo sapiens
aggatgaaatyccctttgcac

SEQ ID NO: 14471 - DNA, 21 bp, Homo sapiens
cgtcatgctgyacacatccag

SEQ ID NO: 14472 - DNA, 21 bp, Homo sapiens
ttttaggtctrttactgggga

SEQ ID NO: 14473 - DNA, 21 bp, Homo sapiens
gctgctaagayagaggcacca

SEQ ID NO: 14474 - DNA, 21 bp, Homo sapiens
tgatgtagctrgttctgcctt

SEQ ID NO: 14475 - DNA, 21 bp, Homo sapiens
gtttcctttarcctgaaaggt

SEQ ID NO: 14476 - DNA, 21 bp, Homo sapiens
ccagcaggccrcattcctggc

SEQ ID NO: 14477 - DNA, 21 bp, Homo sapiens
gtagaaaaatrataaccccta

SEQ ID NO: 14478 - DNA, 21 bp, Homo sapiens
ttccaaatgcwtctgggagga

SEQ ID NO: 14479 - DNA, 21 bp, Homo sapiens
ctctgattttkgtgggacagc

SEQ ID NO: 14480 - DNA, 21 bp, Homo sapiens
ggccagcagcrccgtgagcca

SEQ ID NO: 14481 - DNA, 21 bp, Homo sapiens
ctcgcataacrttatgtggca

SEQ ID NO: 14482 - DNA, 21 bp, Homo sapiens
gaagataaggragcagaggtg

SEQ ID NO: 14483 - DNA, 21 bp, Homo sapiens
tcaagtacccrggatccagca

SEQ ID NO: 14484 - DNA, 21 bp, Homo sapiens
cgagtcagggratgaaatact

SEQ ID NO: 14485 - DNA, 21 bp, Homo sapiens
cttggcagtawctactaagac

SEQ ID NO: 14486 - DNA, 21 bp, Homo sapiens
atgtcacagtscctttctgaa

SEQ ID NO: 14487 - DNA, 21 bp, Homo sapiens
aggatactcckctggccacca

SEQ ID NO: 14488 - DNA, 21 bp, Homo sapiens
ccagtctccawcaaagagaac

SEQ ID NO: 14489 - DNA, 21 bp, Homo sapiens
caccttttttwaaaaatgtga

SEQ ID NO: 14490 - DNA, 21 bp, Homo sapiens
tgaattccccrgcaaatgtga

SEQ ID NO: 14491 - DNA, 21 bp, Homo sapiens
acttctttttrtctttcaaag

SEQ ID NO: 14492 - DNA, 21 bp, Homo sapiens
ttgtttggccytctctcttaa

SEQ ID NO: 14493 - DNA, 21 bp, Homo sapiens
caaagcaaagygctattggaa

SEQ ID NO: 14494 - DNA, 21 bp, Homo sapiens
ttggaagacayttaggttata

SEQ ID NO: 14495 - DNA, 21 bp, Homo sapiens
ttataaaaggrtaataaaaat

SEQ ID NO: 14496 - DNA, 21 bp, Homo sapiens
actgccctccrgactgtaaga

SEQ ID NO: 14497 - DNA, 21 bp, Homo sapiens
gaagtggaccrgagcacgttg

SEQ ID NO: 14498 - DNA, 21 bp, Homo sapiens
ttgatactcartaaatgctgt

SEQ ID NO: 14499 - DNA, 21 bp, Homo sapiens
aatgcgcatayctgttatcaa

SEQ ID NO: 14500 - DNA, 21 bp, Homo sapiens
ccgtaaaagcmcagcttgatg

SEQ ID NO: 14501 - DNA, 21 bp, Homo sapiens
acaggacaagmaaggtgcatc

SEQ ID NO: 14502 - DNA, 21 bp, Homo sapiens
ggagatacaayggagagaaaa

SEQ ID NO: 14503 - DNA, 21 bp, Homo sapiens
tgtgggtctcyaaagcagtaa

SEQ ID NO: 14504 - DNA, 21 bp, Homo sapiens
catgccacacyagtcacatga

SEQ ID NO: 14505 - DNA, 21 bp, Homo sapiens
ccaaaagcagragatggacca

SEQ ID NO: 14506 - DNA, 21 bp, Homo sapiens
caccaagtacycacccagcac

SEQ ID NO: 14507 - DNA, 21 bp, Homo sapiens
gtggaaataayaaactatgac

SEQ ID NO: 14508 - DNA, 21 bp, Homo sapiens
cctgagaggcyagcccaggag

SEQ ID NO: 14509 - DNA, 21 bp, Homo sapiens
ttggagggatmgcttgacagg

SEQ ID NO: 14510 - DNA, 21 bp, Homo sapiens
aatcaatgaamtaatgcacaa

SEQ ID NO: 14511 - DNA, 21 bp, Homo sapiens
actcatgtatrgcccccatgc

SEQ ID NO: 14512 - DNA, 21 bp, Homo sapiens
tggcaagttgycctcttggac

SEQ ID NO: 14513 - DNA, 21 bp, Homo sapiens
aagcagcatgygagtccctga

SEQ ID NO: 14514 - DNA, 21 bp, Homo sapiens
ctcccctaccrtgggcccctg

SEQ ID NO: 14515 - DNA, 21 bp, Homo sapiens
gggaggatagwgataactcac

SEQ ID NO: 14516 - DNA, 21 bp, Homo sapiens
tcaccacagcstgggcacgtg

SEQ ID NO: 14517 - DNA, 21 bp, Homo sapiens
ctgctacctcrcctgtggctc

SEQ ID NO: 14518 - DNA, 21 bp, Homo sapiens
aaagtgtctcygtcccacttg

SEQ ID NO: 14519 - DNA, 21 bp, Homo sapiens
cacagggtaargacaaagaga

SEQ ID NO: 14520 - DNA, 21 bp, Homo sapiens
gcctccagggkaacgccagcc

SEQ ID NO: 14521 - DNA, 21 bp, Homo sapiens
gtctccaaggrtgaccatgta

SEQ ID NO: 14522 - DNA, 21 bp, Homo sapiens
tccaccctcastctcagcaga

SEQ ID NO: 14523 - DNA, 21 bp, Homo sapiens
ccataagtaaygttttatcat

SEQ ID NO: 14524 - DNA, 21 bp, Homo sapiens
cactgtcctgkgctagaggca

SEQ ID NO: 14525 - DNA, 21 bp, Homo sapiens
cagctctgttytcttccgaca

SEQ ID NO: 14526 - DNA, 21 bp, Homo sapiens
aggaaagaggragaagatggt

SEQ ID NO: 14527 - DNA, 21 bp, Homo sapiens
gtcagatcccrctactgtcct

SEQ ID NO: 14528 - DNA, 21 bp, Homo sapiens
ctctggtagastcgggtgcct

SEQ ID NO: 14529 - DNA, 21 bp, Homo sapiens
ccagtgctttsagaagcaatt

SEQ ID NO: 14530 - DNA, 21 bp, Homo sapiens
gggactttggrttcagaggac

SEQ ID NO: 14531 - DNA, 21 bp, Homo sapiens
aaacaggtctkgtgtaggcca

SEQ ID NO: 14532 - DNA, 21 bp, Homo sapiens
ctccctggaayttggatgttg

SEQ ID NO: 14533 - DNA, 21 bp, Homo sapiens
aattccacagmctctaaattt

SEQ ID NO: 14534 - DNA, 21 bp, Homo sapiens
tctgtaaaggygctcatgaca

SEQ ID NO: 14535 - DNA, 21 bp, Homo sapiens
ctcacttaccycacccagcac

SEQ ID NO: 14536 - DNA, 21 bp, Homo sapiens
tcagaagtcasggcaaagttt

SEQ ID NO: 14537 - DNA, 21 bp, Homo sapiens
ctagagaccasaaagtaagca

SEQ ID NO: 14538 - DNA, 21 bp, Homo sapiens
ccacagaagcsaggagataca

SEQ ID NO: 14539 - DNA, 21 bp, Homo sapiens
aagcaacaggraacagtttac

SEQ ID NO: 14540 - DNA, 21 bp, Homo sapiens
cttgggtacasaaataaaatg

SEQ ID NO: 14541 - DNA, 21 bp, Homo sapiens
taagcacccarccgggggctt

SEQ ID NO: 14542 - DNA, 21 bp, Homo sapiens
tgaggaaaccraggcttgagg

SEQ ID NO: 14543 - DNA, 21 bp, Homo sapiens
cttgatgttgrgaagaagtcc

SEQ ID NO: 14544 - DNA, 21 bp, Homo sapiens
gtgaaactccrgccagatgat

SEQ ID NO: 14545 - DNA, 21 bp, Homo sapiens
ggctcctgcaratagggtggc

SEQ ID NO: 14546 - DNA, 21 bp, Homo sapiens
actcagcactycagagccttc

SEQ ID NO: 14547 - DNA, 21 bp, Homo sapiens
ctcatcatatkgtaagttggc

SEQ ID NO: 14548 - DNA, 21 bp, Homo sapiens
cctgcagccarctgccaaccc

SEQ ID NO: 14549 - DNA, 21 bp, Homo sapiens
gagcctaagtrtctcccttgc

SEQ ID NO: 14550 - DNA, 21 bp, Homo sapiens
aggcttctggygaggcttgag

SEQ ID NO: 14551 - DNA, 21 bp, Homo sapiens
actagcagatwtactcccacg

SEQ ID NO: 14552 - DNA, 21 bp, Homo sapiens
atcaccttgasgttcctgaat

SEQ ID NO: 14553 - DNA, 21 bp, Homo sapiens
ctggcaaaaayggagaagggt

SEQ ID NO: 14554 - DNA, 21 bp, Homo sapiens
cacatgagacrtaattacaag

SEQ ID NO: 14555 - DNA, 21 bp, Homo sapiens
gtctcctccayagctgaatgg

SEQ ID NO: 14556 - DNA, 21 bp, Homo sapiens
tttgggaatgyctccctggtc

SEQ ID NO: 14557 - DNA, 21 bp, Homo sapiens
attacttgacrtaaatcatgt

SEQ ID NO: 14558 - DNA, 21 bp, Homo sapiens
cagtatggcarcttgcttcct

SEQ ID NO: 14559 - DNA, 21 bp, Homo sapiens
ggaagagttgsgaaagatctg

SEQ ID NO: 14560 - DNA, 21 bp, Homo sapiens
cagcttatttyacttatttat

SEQ ID NO: 14561 - DNA, 21 bp, Homo sapiens
agcaacagtgmagaaagatga

SEQ ID NO: 14562 - DNA, 21 bp, Homo sapiens
ttgttaaaaarcatgcacaca

SEQ ID NO: 14563 - DNA, 21 bp, Homo sapiens
aagacaagaarcaaagacatg

SEQ ID NO: 14564 - DNA, 21 bp, Homo sapiens
tgaaatgcctrttacactcca

SEQ ID NO: 14565 - DNA, 21 bp, Homo sapiens
agagaaacctmtaaattaaac

SEQ ID NO: 14566 - DNA, 21 bp, Homo sapiens
atatctgcaaytccttgtggt

SEQ ID NO: 14567 - DNA, 21 bp, Homo sapiens
ggtcagttttracaccagact

SEQ ID NO: 14568 - DNA, 21 bp, Homo sapiens
gtgctgtgtgrgtggtgggaa

SEQ ID NO: 14569 - DNA, 21 bp, Homo sapiens
cttgcaactgrgcaaatgagt

SEQ ID NO: 14570 - DNA, 21 bp, Homo sapiens
actttgtaagsggtatatggg

SEQ ID NO: 14571 - DNA, 21 bp, Homo sapiens
catagggttcygaagagttct

SEQ ID NO: 14572 - DNA, 21 bp, Homo sapiens
agtggagccgkgggggagaga

SEQ ID NO: 14573 - DNA, 21 bp, Homo sapiens
acaaaatatayaactatatat

SEQ ID NO: 14574 - DNA, 21 bp, Homo sapiens
ctagcaactgwaaagaaagac

SEQ ID NO: 14575 - DNA, 21 bp, Homo sapiens
actccccaaasagaagagcac

SEQ ID NO: 14576 - DNA, 21 bp, Homo sapiens
ggtaaattcasataaatgaag

SEQ ID NO: 14577 - DNA, 21 bp, Homo sapiens
aagcaagttaraacaatatcc

SEQ ID NO: 14578 - DNA, 21 bp, Homo sapiens
tcatgatcacrctgtatttac

SEQ ID NO: 14579 - DNA, 21 bp, Homo sapiens
tttgtgacttytgcattacct

SEQ ID NO: 14580 - DNA, 21 bp, Homo sapiens
gcccttatatrgtattttcat

SEQ ID NO: 14581 - DNA, 21 bp, Homo sapiens
aagtgttgccygttaaaactg

SEQ ID NO: 14582 - DNA, 21 bp, Homo sapiens
atgcaatttayatctccagta

SEQ ID NO: 14583 - DNA, 21 bp, Homo sapiens
aaatgctagtrgccactcagt

SEQ ID NO: 14584 - DNA, 21 bp, Homo sapiens
ctgtctcccaktttagaatgt

SEQ ID NO: 14585 - DNA, 21 bp, Homo sapiens
agttaggaaawactgttttgt

SEQ ID NO: 14586 - DNA, 21 bp, Homo sapiens
gacatagccaycataaagtca

SEQ ID NO: 14587 - DNA, 21 bp, Homo sapiens
tggtaagtttratgtacgtat

SEQ ID NO: 14588 - DNA, 21 bp, Homo sapiens
tattctggatrcaagcccttt

SEQ ID NO: 14589 - DNA, 21 bp, Homo sapiens
aggtcctttgwctttacatac

SEQ ID NO: 14590 - DNA, 21 bp, Homo sapiens
gtgacttttakttaatttatg

SEQ ID NO: 14591 - DNA, 21 bp, Homo sapiens
tctaatttatstcagcaatgt

SEQ ID NO: 14592 - DNA, 21 bp, Homo sapiens
ttgcttttcaygtttatatct

SEQ ID NO: 14593 - DNA, 21 bp, Homo sapiens
gtgcatttttrtgtgacatat

SEQ ID NO: 14594 - DNA, 21 bp, Homo sapiens
cagaatctggyctcttgcaaa

SEQ ID NO: 14595 - DNA, 21 bp, Homo sapiens
tttttaaaggkcattgctgtg

SEQ ID NO: 14596 - DNA, 21 bp, Homo sapiens
cacagcaccamtattttatat

SEQ ID NO: 14597 - DNA, 21 bp, Homo sapiens
gaatcatacartatgggaaaa

SEQ ID NO: 14598 - DNA, 21 bp, Homo sapiens
tttgtgacatrtgcagagaca

SEQ ID NO: 14599 - DNA, 21 bp, Homo sapiens
atttgggaaamcttatatggt

SEQ ID NO: 14600 - DNA, 21 bp, Homo sapiens
gtgcttctgtragataagagt

SEQ ID NO: 14601 - DNA, 21 bp, Homo sapiens
tctaatttgaragctcattgt

SEQ ID NO: 14602 - DNA, 21 bp, Homo sapiens
agagattgtcrtattcaaacg

SEQ ID NO: 14603 - DNA, 21 bp, Homo sapiens
cctgttaactmcttattttaa

SEQ ID NO: 14604 - DNA, 21 bp, Homo sapiens
gtcaagagagytttatttaat

SEQ ID NO: 14605 - DNA, 21 bp, Homo sapiens
ggtcacacatwtgtgtggcca

SEQ ID NO: 14606 - DNA, 21 bp, Homo sapiens
tgtttttagawccttatattt

SEQ ID NO: 14607 - DNA, 21 bp, Homo sapiens
aaggaaattayaggataataa

SEQ ID NO: 14608 - DNA, 21 bp, Homo sapiens
agatttctttrtgaagaaaaa

SEQ ID NO: 14609 - DNA, 21 bp, Homo sapiens
accctggtacyagcagacatc

SEQ ID NO: 14610 - DNA, 21 bp, Homo sapiens
tgcatatcctrtgtgcctctt

SEQ ID NO: 14611 - DNA, 21 bp, Homo sapiens
tttaaaaacayacaaatacaa

SEQ ID NO: 14612 - DNA, 21 bp, Homo sapiens
tcccacattgytaagttactt

SEQ ID NO: 14613 - DNA, 21 bp, Homo sapiens
ctaaagtggtrtgatgaagca

SEQ ID NO: 14614 - DNA, 21 bp, Homo sapiens
tcttccccaarcatatccaga

SEQ ID NO: 14615 - DNA, 21 bp, Homo sapiens
attttagtgtytactgtagga

SEQ ID NO: 14616 - DNA, 21 bp, Homo sapiens
ctagataccarctgaggtctt

SEQ ID NO: 14617 - DNA, 21 bp, Homo sapiens
tgtttgtgtcyttaggcaaag

SEQ ID NO: 14618 - DNA, 21 bp, Homo sapiens
ggaagaaaaasaataactaaa

SEQ ID NO: 14619 - DNA, 21 bp, Homo sapiens
ccaggctgggraatatcagag

SEQ ID NO: 14620 - DNA, 21 bp, Homo sapiens
tttttatggtwctgttgacct

SEQ ID NO: 14621 - DNA, 21 bp, Homo sapiens
ccactcagctrcaagggagat

SEQ ID NO: 14622 - DNA, 21 bp, Homo sapiens
ccttgtagatmagaggcaccc

SEQ ID NO: 14623 - DNA, 21 bp, Homo sapiens
cgcctcagackgaggatcccc

SEQ ID NO: 14624 - DNA, 21 bp, Homo sapiens
tctggccccaycctggtccat

SEQ ID NO: 14625 - DNA, 21 bp, Homo sapiens
atagaattaasagtgacttaa

SEQ ID NO: 14626 - DNA, 21 bp, Homo sapiens
gtaggcagcamctggttaagt

SEQ ID NO: 14627 - DNA, 21 bp, Homo sapiens
tcttcacatcrtcttccctct

SEQ ID NO: 14628 - DNA, 21 bp, Homo sapiens
gagtgtctgcrggcccatcgc

SEQ ID NO: 14629 - DNA, 21 bp, Homo sapiens
acaactttcayatttgccttg

SEQ ID NO: 14630 - DNA, 21 bp, Homo sapiens
tgcatggaaargggagggcag

SEQ ID NO: 14631 - DNA, 21 bp, Homo sapiens
gatccctgacsgtagcttgcg

SEQ ID NO: 14632 - DNA, 21 bp, Homo sapiens
tcacaagcacstagaacagtg

SEQ ID NO: 14633 - DNA, 21 bp, Homo sapiens
gcatcactgcmtttttttttt

SEQ ID NO: 14634 - DNA, 21 bp, Homo sapiens
aatttctctcrttttgcaata

SEQ ID NO: 14635 - DNA, 21 bp, Homo sapiens
ggagtggttaragaggcccac

SEQ ID NO: 14636 - DNA, 21 bp, Homo sapiens
tttttgtctayggaacccttc

SEQ ID NO: 14637 - DNA, 21 bp, Homo sapiens
tcagcatttcsgggttcatct

SEQ ID NO: 14638 - DNA, 21 bp, Homo sapiens
ttaactgtaayattgggcaag

SEQ ID NO: 14639 - DNA, 21 bp, Homo sapiens
gacaatgggtkctgagaaatc

SEQ ID NO: 14640 - DNA, 21 bp, Homo sapiens
ggtccagttcyacaacaaaca

SEQ ID NO: 14641 - DNA, 21 bp, Homo sapiens
aatcagtcctytctaaacgtg

SEQ ID NO: 14642 - DNA, 21 bp, Homo sapiens
gtaaacaatamatgatagctg

SEQ ID NO: 14643 - DNA, 21 bp, Homo sapiens
gacttctttcygaagtcatcc

SEQ ID NO: 14644 - DNA, 21 bp, Homo sapiens
agagaccaggyttaaaatttt

SEQ ID NO: 14645 - DNA, 21 bp, Homo sapiens
tgaaagtttckatgacacagc

SEQ ID NO: 14646 - DNA, 21 bp, Homo sapiens
caatttccttyttaaatttat

SEQ ID NO: 14647 - DNA, 21 bp, Homo sapiens
cttcagcctcyaagaaggctt

SEQ ID NO: 14648 - DNA, 21 bp, Homo sapiens
gcaatgatccwtcttatggat

SEQ ID NO: 14649 - DNA, 21 bp, Homo sapiens
ttttggggggkggggtggggt

SEQ ID NO: 14650 - DNA, 21 bp, Homo sapiens
aggtattgcaygccctcctca

SEQ ID NO: 14651 - DNA, 21 bp, Homo sapiens
gcgccgaacgrcgtgactaag

SEQ ID NO: 14652 - DNA, 21 bp, Homo sapiens
ttttcaagggrcctaactctc

SEQ ID NO: 14653 - DNA, 21 bp, Homo sapiens
tctggctctgmaatcagtctg

SEQ ID NO: 14654 - DNA, 21 bp, Homo sapiens
tatttctctgygttggatagt

SEQ ID NO: 14655 - DNA, 21 bp, Homo sapiens
gaatctgcctyctgatcctct

SEQ ID NO: 14656 - DNA, 21 bp, Homo sapiens
catatctaaaracaccctccc

SEQ ID NO: 14657 - DNA, 21 bp, Homo sapiens
aaaggggaagyaaggcattgc

SEQ ID NO: 14658 - DNA, 21 bp, Homo sapiens
ctacccagcarcaagttatct

SEQ ID NO: 14659 - DNA, 21 bp, Homo sapiens
tcctgggaacmttgacaagaa

SEQ ID NO: 14660 - DNA, 21 bp, Homo sapiens
gcacggtcggygtgggtctgg

SEQ ID NO: 14661 - DNA, 21 bp, Homo sapiens
ggcaggtctcyagtggctggt

SEQ ID NO: 14662 - DNA, 21 bp, Homo sapiens
tgttggtcttscctgtcctca

SEQ ID NO: 14663 - DNA, 21 bp, Homo sapiens
cttggttggtsctggctggga

SEQ ID NO: 14664 - DNA, 21 bp, Homo sapiens
aaagaaagcartcaagggcgc

SEQ ID NO: 14665 - DNA, 21 bp, Homo sapiens
tccccagtccycgctgacttt

SEQ ID NO: 14666 - DNA, 21 bp, Homo sapiens
caaacaaggtsctcatacatg

SEQ ID NO: 14667 - DNA, 21 bp, Homo sapiens
tgacccagccyaatactcacc

SEQ ID NO: 14668 - DNA, 21 bp, Homo sapiens
gtcggctcccwgctcgggacc

SEQ ID NO: 14669 - DNA, 21 bp, Homo sapiens
actggagttaygactagtatg

SEQ ID NO: 14670 - DNA, 21 bp, Homo sapiens
cacccgcaacrtcacttgtca

SEQ ID NO: 14671 - DNA, 21 bp, Homo sapiens
tgtacaaactratcaccagct

SEQ ID NO: 14672 - DNA, 21 bp, Homo sapiens
gacaatggccraggcatagat

SEQ ID NO: 14673 - DNA, 21 bp, Homo sapiens
cacaagaagtrtgtgcttttg

SEQ ID NO: 14674 - DNA, 21 bp, Homo sapiens
ccccagtgaartgtgaaagga

SEQ ID NO: 14675 - DNA, 21 bp, Homo sapiens
acagctttatstctctgagtc

SEQ ID NO: 14676 - DNA, 21 bp, Homo sapiens
ggcccacggcsgggcgccgag

SEQ ID NO: 14677 - DNA, 21 bp, Homo sapiens
aagggagtggrttgggggtgt

SEQ ID NO: 14678 - DNA, 21 bp, Homo sapiens
ttaaattaaamattttttaaa

SEQ ID NO: 14679 - DNA, 21 bp, Homo sapiens
tcaaattttgkatttcctctt

SEQ ID NO: 14680 - DNA, 21 bp, Homo sapiens
gtagccttttragtctggagt

SEQ ID NO: 14681 - DNA, 21 bp, Homo sapiens
tacaaggcagrtcattttgct

SEQ ID NO: 14682 - DNA, 21 bp, Homo sapiens
accccatccayccaggtctag

SEQ ID NO: 14683 - DNA, 21 bp, Homo sapiens
atacaagttgktgtaaatgct

SEQ ID NO: 14684 - DNA, 21 bp, Homo sapiens
acccagagcaygtggcaggca

SEQ ID NO: 14685 - DNA, 21 bp, Homo sapiens
tgggggcttaragataatggg

SEQ ID NO: 14686 - DNA, 21 bp, Homo sapiens
ttggggtgggkgtggttctgc

SEQ ID NO: 14687 - DNA, 21 bp, Homo sapiens
aacttcctgcygctctgtggc

SEQ ID NO: 14688 - DNA, 21 bp, Homo sapiens
aggcatctcaytgtagaatgt

SEQ ID NO: 14689 - DNA, 21 bp, Homo sapiens
ggaactgggakagagaacaca

SEQ ID NO: 14690 - DNA, 21 bp, Homo sapiens
ccataccccaygtggggctta

SEQ ID NO: 14691 - DNA, 21 bp, Homo sapiens
agacccaggargaacttcctt

SEQ ID NO: 14692 - DNA, 21 bp, Homo sapiens
tattgtattgktgactataca

SEQ ID NO: 14693 - DNA, 21 bp, Homo sapiens
gctgcctgggytggagcacct

SEQ ID NO: 14694 - DNA, 21 bp, Homo sapiens
gctaggagagrccaaggtccc

SEQ ID NO: 14695 - DNA, 21 bp, Homo sapiens
atgttagtctytttgccagta

SEQ ID NO: 14696 - DNA, 21 bp, Homo sapiens
tttcacaaaayactttctgtc

SEQ ID NO: 14697 - DNA, 21 bp, Homo sapiens
tcaagaagtcrgcaggggcca

SEQ ID NO: 14698 - DNA, 21 bp, Homo sapiens
tttcatctgtrtatgagtttt

SEQ ID NO: 14699 - DNA, 21 bp, Homo sapiens
tgctccagacrgggaatgggc

SEQ ID NO: 14700 - DNA, 21 bp, Homo sapiens
ctgtctccttrgggtgcctct

SEQ ID NO: 14701 - DNA, 21 bp, Homo sapiens
ccaggactgcyggttgccatc

SEQ ID NO: 14702 - DNA, 21 bp, Homo sapiens
aataataaaawtaggtatcat

SEQ ID NO: 14703 - DNA, 21 bp, Homo sapiens
tctcttttgartatgtctttt

SEQ ID NO: 14704 - DNA, 21 bp, Homo sapiens
ggggtccaggyaggcaaggga

SEQ ID NO: 14705 - DNA, 21 bp, Homo sapiens
gccctcttaartctttctcaa

SEQ ID NO: 14706 - DNA, 21 bp, Homo sapiens
ttttatataayggttttcaaa

SEQ ID NO: 14707 - DNA, 21 bp, Homo sapiens
gttaaattttrctgactcaag

SEQ ID NO: 14708 - DNA, 21 bp, Homo sapiens
taattacaatkgcatgataga

SEQ ID NO: 14709 - DNA, 21 bp, Homo sapiens
ggcaacacagwgtaggaaaac

SEQ ID NO: 14710 - DNA, 21 bp, Homo sapiens
gccccccaaaktgctgggctt

SEQ ID NO: 14711 - DNA, 21 bp, Homo sapiens
agaaagtctayaatagatcat

SEQ ID NO: 14712 - DNA, 21 bp, Homo sapiens
cccccacatcratggccttgg

SEQ ID NO: 14713 - DNA, 21 bp, Homo sapiens
aaagctgaacrttgacaacct

SEQ ID NO: 14714 - DNA, 21 bp, Homo sapiens
ggggtgggggrttgtgtgtgg

SEQ ID NO: 14715 - DNA, 21 bp, Homo sapiens
cagaaaggccraggaacatgt

SEQ ID NO: 14716 - DNA, 21 bp, Homo sapiens
aggaatttgakttgttaagca

SEQ ID NO: 14717 - DNA, 21 bp, Homo sapiens
cttgtcccttyggttaagcca

SEQ ID NO: 14718 - DNA, 21 bp, Homo sapiens
agagtggaatrctggagcatg

SEQ ID NO: 14719 - DNA, 21 bp, Homo sapiens
gatgtagtcargcagtaagta

SEQ ID NO: 14720 - DNA, 21 bp, Homo sapiens
aggtggaggargggaggcact

SEQ ID NO: 14721 - DNA, 21 bp, Homo sapiens
tccatccctaytccaacatat

SEQ ID NO: 14722 - DNA, 21 bp, Homo sapiens
gttagcctacrgctcaactct

SEQ ID NO: 14723 - DNA, 21 bp, Homo sapiens
gaaggatggaytaagaggagg

SEQ ID NO: 14724 - DNA, 21 bp, Homo sapiens
catgttaagtsacaaagaaga

SEQ ID NO: 14725 - DNA, 21 bp, Homo sapiens
cgcctgagcawtctatccaga

SEQ ID NO: 14726 - DNA, 21 bp, Homo sapiens
cctgggcttargaatgtccct

SEQ ID NO: 14727 - DNA, 21 bp, Homo sapiens
taagggaagaragaggtacca

SEQ ID NO: 14728 - DNA, 21 bp, Homo sapiens
agaattcctcytccctcaaag

SEQ ID NO: 14729 - DNA, 21 bp, Homo sapiens
acccaactcayagggcctttg

SEQ ID NO: 14730 - DNA, 21 bp, Homo sapiens
ccagaactgarattggagcat

SEQ ID NO: 14731 - DNA, 21 bp, Homo sapiens
tctttcctatrcttaggacag

SEQ ID NO: 14732 - DNA, 21 bp, Homo sapiens
tgccccctccyctctcactcc

SEQ ID NO: 14733 - DNA, 21 bp, Homo sapiens
attctaaggcstgtggctctt

SEQ ID NO: 14734 - DNA, 21 bp, Homo sapiens
agcaaatggcrttgagctgag

SEQ ID NO: 14735 - DNA, 21 bp, Homo sapiens
tgaccaactcytgccccagta

SEQ ID NO: 14736 - DNA, 21 bp, Homo sapiens
aatttaggttytaagaccctg

SEQ ID NO: 14737 - DNA, 21 bp, Homo sapiens
cctggatttgrgatgcacttt

SEQ ID NO: 14738 - DNA, 21 bp, Homo sapiens
ggaggcctggrtgcccacacc

SEQ ID NO: 14739 - DNA, 21 bp, Homo sapiens
tggatttgttytggggattgc

SEQ ID NO: 14740 - DNA, 21 bp, Homo sapiens
ctagggtacasgtcactgagt

SEQ ID NO: 14741 - DNA, 21 bp, Homo sapiens
accccttttcstgcattcctg

SEQ ID NO: 14742 - DNA, 21 bp, Homo sapiens
gaggggttggwtctgagcccc

SEQ ID NO: 14743 - DNA, 21 bp, Homo sapiens
agaggcccaaragtcatcagc

SEQ ID NO: 14744 - DNA, 21 bp, Homo sapiens
ctggaggttgsgggtgagggc

SEQ ID NO: 14745 - DNA, 21 bp, Homo sapiens
tcctaacctaraaacctctca

SEQ ID NO: 14746 - DNA, 21 bp, Homo sapiens
aacttgttcargataggggag

SEQ ID NO: 14747 - DNA, 21 bp, Homo sapiens
caaagtagggygaggaggctg

SEQ ID NO: 14748 - DNA, 21 bp, Homo sapiens
tctgtcctgcycctgttggga

SEQ ID NO: 14749 - DNA, 21 bp, Homo sapiens
gagaggttgcygtcaaggctg

SEQ ID NO: 14750 - DNA, 21 bp, Homo sapiens
ggaagctagarggatgttctg

SEQ ID NO: 14751 - DNA, 21 bp, Homo sapiens
aacactctggrcctcctgcca

SEQ ID NO: 14752 - DNA, 21 bp, Homo sapiens
tgagatgcagstggctcccca

SEQ ID NO: 14753 - DNA, 21 bp, Homo sapiens
gccatggcccrtggggcatct

SEQ ID NO: 14754 - DNA, 21 bp, Homo sapiens
gcttgggtggscatgggtggg

SEQ ID NO: 14755 - DNA, 21 bp, Homo sapiens
atcgagggccytagagagagg

SEQ ID NO: 14756 - DNA, 21 bp, Homo sapiens
atgtggattarctgtgggtcc

SEQ ID NO: 14757 - DNA, 21 bp, Homo sapiens
ggactaaggcrtttttctcca

SEQ ID NO: 14758 - DNA, 21 bp, Homo sapiens
cttacggtgcmagttccttgc

SEQ ID NO: 14759 - DNA, 21 bp, Homo sapiens
aatgtatagakctgggaacta

SEQ ID NO: 14760 - DNA, 21 bp, Homo sapiens
agcatttgtayttagaaggtc

SEQ ID NO: 14761 - DNA, 21 bp, Homo sapiens
tccttaactcygggccagtgc

SEQ ID NO: 14762 - DNA, 21 bp, Homo sapiens
cttcctctagmccccaaacta

SEQ ID NO: 14763 - DNA, 21 bp, Homo sapiens
cctctgcaccsaagtgtgtga

SEQ ID NO: 14764 - DNA, 21 bp, Homo sapiens
cagccagaggrgaggtggcat

SEQ ID NO: 14765 - DNA, 21 bp, Homo sapiens
gccgtgctgcrgctccggcac

SEQ ID NO: 14766 - DNA, 21 bp, Homo sapiens
gtccctgccayaggaatatgg

SEQ ID NO: 14767 - DNA, 21 bp, Homo sapiens
ctgctcctccyggctactaat

SEQ ID NO: 14768 - DNA, 21 bp, Homo sapiens
ttgggctcgcrctgcccacat

SEQ ID NO: 14769 - DNA, 21 bp, Homo sapiens
cctctgaccgkggggcagcca

SEQ ID NO: 14770 - DNA, 21 bp, Homo sapiens
agcccggtgcmcttcgtcgct

SEQ ID NO: 14771 - DNA, 21 bp, Homo sapiens
tggctgcgggrggctggagaa

SEQ ID NO: 14772 - DNA, 21 bp, Homo sapiens
ggaggctgtgwgcccagatct

SEQ ID NO: 14773 - DNA, 21 bp, Homo sapiens
gctagggcaayggtcagggtg

SEQ ID NO: 14774 - DNA, 21 bp, Homo sapiens
ctgagtcttgwgttcacatca

SEQ ID NO: 14775 - DNA, 21 bp, Homo sapiens
tagctgcgtgragagagcaca

SEQ ID NO: 14776 - DNA, 21 bp, Homo sapiens
gggcaaacatrtgcgtagggc

SEQ ID NO: 14777 - DNA, 21 bp, Homo sapiens
tctacagagayggtttgggct

SEQ ID NO: 14778 - DNA, 21 bp, Homo sapiens
ccccacctcaygactcccagg

SEQ ID NO: 14779 - DNA, 21 bp, Homo sapiens
cacttgttatrgatgaacaag

SEQ ID NO: 14780 - DNA, 21 bp, Homo sapiens
tggccagcagscacagcactg

SEQ ID NO: 14781 - DNA, 21 bp, Homo sapiens
tagacattgtrgcccgaatgt

SEQ ID NO: 14782 - DNA, 21 bp, Homo sapiens
aaggcactgtmcttttcatgg

SEQ ID NO: 14783 - DNA, 21 bp, Homo sapiens
cagataaaacrggggcaccag

SEQ ID NO: 14784 - DNA, 21 bp, Homo sapiens
cagtagctttyctgactggac

SEQ ID NO: 14785 - DNA, 21 bp, Homo sapiens
gtcctggaagmcacaaggtaa

SEQ ID NO: 14786 - DNA, 21 bp, Homo sapiens
ggattccttgsgggggtcctc

SEQ ID NO: 14787 - DNA, 21 bp, Homo sapiens
tttaatcctaraacaccccta

SEQ ID NO: 14788 - DNA, 21 bp, Homo sapiens
atttttctgaratcctttctt

SEQ ID NO: 14789 - DNA, 21 bp, Homo sapiens
ggggaggaagygtggggaaga

SEQ ID NO: 14790 - DNA, 21 bp, Homo sapiens
ctcccacttayagcagaagaa

SEQ ID NO: 14791 - DNA, 21 bp, Homo sapiens
ctctctgttaytaacccgtcc

SEQ ID NO: 14792 - DNA, 21 bp, Homo sapiens
agagtgggcaygatgacctga

SEQ ID NO: 14793 - DNA, 21 bp, Homo sapiens
tccagaggggrccatggttaa

SEQ ID NO: 14794 - DNA, 21 bp, Homo sapiens
gcgcctactckctgaccctgc

SEQ ID NO: 14795 - DNA, 21 bp, Homo sapiens
agggtgtgctrtctggtaaaa

SEQ ID NO: 14796 - DNA, 21 bp, Homo sapiens
gaccccctgasatatgtccct

SEQ ID NO: 14797 - DNA, 21 bp, Homo sapiens
gcaagggggtrtggagaggag

SEQ ID NO: 14798 - DNA, 21 bp, Homo sapiens
gacgtccatcrtctctgcggt

SEQ ID NO: 14799 - DNA, 21 bp, Homo sapiens
gaaggaccccrtggctgcagg

SEQ ID NO: 14800 - DNA, 21 bp, Homo sapiens
atctggtaccycagcagggct

SEQ ID NO: 14801 - DNA, 21 bp, Homo sapiens
tctggaaaggsccaagactct

SEQ ID NO: 14802 - DNA, 21 bp, Homo sapiens
ccagactggaygtataaaaac

SEQ ID NO: 14803 - DNA, 21 bp, Homo sapiens
ccatcacctcycacaagtccc

SEQ ID NO: 14804 - DNA, 21 bp, Homo sapiens
aggctgtgccmgtctccggct

SEQ ID NO: 14805 - DNA, 21 bp, Homo sapiens
tggggctggarccactggggg

SEQ ID NO: 14806 - DNA, 21 bp, Homo sapiens
acgatggggcrtggggcttgg

SEQ ID NO: 14807 - DNA, 21 bp, Homo sapiens
cctggcttgtsgggggaggta

SEQ ID NO: 14808 - DNA, 21 bp, Homo sapiens
gacggatagtyggccccagca

SEQ ID NO: 14809 - DNA, 21 bp, Homo sapiens
gggaccctgcytggctccttc

SEQ ID NO: 14810 - DNA, 21 bp, Homo sapiens
agcaacgagcyggtcgccccg

SEQ ID NO: 14811 - DNA, 21 bp, Homo sapiens
cccggccactrttactctagc

SEQ ID NO: 14812 - DNA, 21 bp, Homo sapiens
tgggtctccargtatctaaaa

SEQ ID NO: 14813 - DNA, 21 bp, Homo sapiens
ttagttttctytccgtaggaa

SEQ ID NO: 14814 - DNA, 21 bp, Homo sapiens
ctgttttttgyttgtttgttt

SEQ ID NO: 14815 - DNA, 21 bp, Homo sapiens
tcactttgacrgagtctcttg

SEQ ID NO: 14816 - DNA, 21 bp, Homo sapiens
agcttcaaatrtagaaagttt

SEQ ID NO: 14817 - DNA, 21 bp, Homo sapiens
acccaacagasaggctccaga

SEQ ID NO: 14818 - DNA, 21 bp, Homo sapiens
gagatcttttyttcatgttct

SEQ ID NO: 14819 - DNA, 21 bp, Homo sapiens
ggtatcaatarttgctgcctt

SEQ ID NO: 14820 - DNA, 21 bp, Homo sapiens
taccaactttwctctgacaca

SEQ ID NO: 14821 - DNA, 21 bp, Homo sapiens
tttgttttttktttttttttt

SEQ ID NO: 14822 - DNA, 21 bp, Homo sapiens
ttttattcctygttacccacc

SEQ ID NO: 14823 - DNA, 21 bp, Homo sapiens
tcccaattctmagaaggaaac

SEQ ID NO: 14824 - DNA, 21 bp, Homo sapiens
gttttaattgmctcttcccta

SEQ ID NO: 14825 - DNA, 21 bp, Homo sapiens
atgaaggaaargtttcaccca

SEQ ID NO: 14826 - DNA, 21 bp, Homo sapiens
tcatttctcaygtggctgcat

SEQ ID NO: 14827 - DNA, 21 bp, Homo sapiens
attaggtcccragttagggag

SEQ ID NO: 14828 - DNA, 21 bp, Homo sapiens
tcctcttgctrcataggagga

SEQ ID NO: 14829 - DNA, 21 bp, Homo sapiens
cactccatggwcactgaactt

SEQ ID NO: 14830 - DNA, 21 bp, Homo sapiens
gttctctttgsctcccttctt

SEQ ID NO: 14831 - DNA, 21 bp, Homo sapiens
gtggtgggtgyatggatgttt

SEQ ID NO: 14832 - DNA, 21 bp, Homo sapiens
ttggagagcaygttgatacta

SEQ ID NO: 14833 - DNA, 21 bp, Homo sapiens
gagataatgasgccctaatgc

SEQ ID NO: 14834 - DNA, 21 bp, Homo sapiens
taactgctacycatcaaaaaa

SEQ ID NO: 14835 - DNA, 21 bp, Homo sapiens
cccatctctgkttcttccctt

SEQ ID NO: 14836 - DNA, 21 bp, Homo sapiens
ttgtgtaatawtcccctccag

SEQ ID NO: 14837 - DNA, 21 bp, Homo sapiens
agtatagtttytgagctatga

SEQ ID NO: 14838 - DNA, 21 bp, Homo sapiens
atggaattttmtcctaatgta

SEQ ID NO: 14839 - DNA, 21 bp, Homo sapiens
cacttggcaaraaaagctgct

SEQ ID NO: 14840 - DNA, 21 bp, Homo sapiens
atttgcgtgtrctaagcagta

SEQ ID NO: 14841 - DNA, 21 bp, Homo sapiens
tgacccaaacrttatgtggta

SEQ ID NO: 14842 - DNA, 21 bp, Homo sapiens
tgaattaaaayagggctgtgt

SEQ ID NO: 14843 - DNA, 21 bp, Homo sapiens
acaacggaatkgcctagagat

SEQ ID NO: 14844 - DNA, 21 bp, Homo sapiens
gggaatttgakgggtgcatta

SEQ ID NO: 14845 - DNA, 21 bp, Homo sapiens
ttataaatatrtattaagtag

SEQ ID NO: 14846 - DNA, 21 bp, Homo sapiens
acattcctctytctttggtat

SEQ ID NO: 14847 - DNA, 21 bp, Homo sapiens
gagcattccaratttaataag

SEQ ID NO: 14848 - DNA, 21 bp, Homo sapiens
cctcatccacwtccttcttga

SEQ ID NO: 14849 - DNA, 21 bp, Homo sapiens
gttcatttacyctttcttctg

SEQ ID NO: 14850 - DNA, 21 bp, Homo sapiens
ggccacagtaygggattatca

SEQ ID NO: 14851 - DNA, 21 bp, Homo sapiens
tttcaaattcrtttttggctt

SEQ ID NO: 14852 - DNA, 21 bp, Homo sapiens
aactttgaatytcaagagttt

SEQ ID NO: 14853 - DNA, 21 bp, Homo sapiens
ttactctccawattagcattc

SEQ ID NO: 14854 - DNA, 21 bp, Homo sapiens
acagcaaaaartgtcactacg

SEQ ID NO: 14855 - DNA, 21 bp, Homo sapiens
agtcaaatgaycaaacacaca

SEQ ID NO: 14856 - DNA, 21 bp, Homo sapiens
tttaagtactracaataagta

SEQ ID NO: 14857 - DNA, 21 bp, Homo sapiens
ttgtggtagcytgggcaacag

SEQ ID NO: 14858 - DNA, 21 bp, Homo sapiens
caggacgccayggcctttctg

SEQ ID NO: 14859 - DNA, 21 bp, Homo sapiens
aatactctatmcgcaaggacc

SEQ ID NO: 14860 - DNA, 21 bp, Homo sapiens
ctgtggctacycggcctctcc

SEQ ID NO: 14861 - DNA, 21 bp, Homo sapiens
actgacaaagkttgctcctgg

SEQ ID NO: 14862 - DNA, 21 bp, Homo sapiens
gaaaaggccartcgggctcca

SEQ ID NO: 14863 - DNA, 21 bp, Homo sapiens
ggaatatcttyaatcctcccc

SEQ ID NO: 14864 - DNA, 21 bp, Homo sapiens
tagaatagttwtgctgaagtc

SEQ ID NO: 14865 - DNA, 21 bp, Homo sapiens
tgacagaattragattttgtg

SEQ ID NO: 14866 - DNA, 21 bp, Homo sapiens
atttacatcawcggtttataa

SEQ ID NO: 14867 - DNA, 21 bp, Homo sapiens
taccaaaaaawatatatatat

SEQ ID NO: 14868 - DNA, 21 bp, Homo sapiens
ttgaagttttmatggattatt

SEQ ID NO: 14869 - DNA, 21 bp, Homo sapiens
gtacaaccatrtcaacaattg

SEQ ID NO: 14870 - DNA, 21 bp, Homo sapiens
gtatcctgccrtggttttcta

SEQ ID NO: 14871 - DNA, 21 bp, Homo sapiens
acactgatcartttcttccat

SEQ ID NO: 14872 - DNA, 21 bp, Homo sapiens
gtgttgtcacyggacattttt

SEQ ID NO: 14873 - DNA, 21 bp, Homo sapiens
gactaggttaycctgaaatag

SEQ ID NO: 14874 - DNA, 21 bp, Homo sapiens
cgttataaatrgggaaaaacg

SEQ ID NO: 14875 - DNA, 21 bp, Homo sapiens
caatggaaggsgaaggcctct

SEQ ID NO: 14876 - DNA, 21 bp, Homo sapiens
tataaaaccgyagcttaatga

SEQ ID NO: 14877 - DNA, 21 bp, Homo sapiens
acggtgatttrgtttgctgat

SEQ ID NO: 14878 - DNA, 21 bp, Homo sapiens
gctgctgtccygggactaacc

SEQ ID NO: 14879 - DNA, 21 bp, Homo sapiens
ggcttgtctgrgtcctccatg

SEQ ID NO: 14880 - DNA, 21 bp, Homo sapiens
aaatgacgaaygggaagccca

SEQ ID NO: 14881 - DNA, 21 bp, Homo sapiens
actgactcttytccctctctg

SEQ ID NO: 14882 - DNA, 21 bp, Homo sapiens
gcgtgcttgcrtaaaggggag

SEQ ID NO: 14883 - DNA, 21 bp, Homo sapiens
gtcacaaacaygcatggactc

SEQ ID NO: 14884 - DNA, 21 bp, Homo sapiens
ccatattccastttgggctcc

SEQ ID NO: 14885 - DNA, 21 bp, Homo sapiens
tggatgggtgyctccctacca

SEQ ID NO: 14886 - DNA, 21 bp, Homo sapiens
agttgacacarcaacatggct

SEQ ID NO: 14887 - DNA, 21 bp, Homo sapiens
gggtgggagaygcagggtcag

SEQ ID NO: 14888 - DNA, 21 bp, Homo sapiens
cactcagcacracccctgctg

SEQ ID NO: 14889 - DNA, 21 bp, Homo sapiens
agctggcaggyggctgcttag

SEQ ID NO: 14890 - DNA, 21 bp, Homo sapiens
caacattggcygggatgaggg

SEQ ID NO: 14891 - DNA, 21 bp, Homo sapiens
tcagctgtgamtagccctaag

SEQ ID NO: 14892 - DNA, 21 bp, Homo sapiens
acctcgttgcyaaaagaattg

SEQ ID NO: 14893 - DNA, 21 bp, Homo sapiens
ttaggtgatcrgagggctata

SEQ ID NO: 14894 - DNA, 21 bp, Homo sapiens
caccaatacayccccgacaca

SEQ ID NO: 14895 - DNA, 21 bp, Homo sapiens
ctatcaatcaytgaggctctg

SEQ ID NO: 14896 - DNA, 21 bp, Homo sapiens
gaatgtgccayggcgtgaaag

SEQ ID NO: 14897 - DNA, 21 bp, Homo sapiens
gcatcaaagcsagaggcaacc

SEQ ID NO: 14898 - DNA, 21 bp, Homo sapiens
ggctcctgcayggaacgactg

SEQ ID NO: 14899 - DNA, 21 bp, Homo sapiens
cacacacgtayctgcctcggg

SEQ ID NO: 14900 - DNA, 21 bp, Homo sapiens
gcccaaagagrggcagcgagt

SEQ ID NO: 14901 - DNA, 21 bp, Homo sapiens
accagctggcractccacccc

SEQ ID NO: 14902 - DNA, 21 bp, Homo sapiens
cccatcggaaracgttgtaag

SEQ ID NO: 14903 - DNA, 21 bp, Homo sapiens
tgtcccttcckccaaggaaaa

SEQ ID NO: 14904 - DNA, 21 bp, Homo sapiens
ctggagagggrcctgggggat

SEQ ID NO: 14905 - DNA, 21 bp, Homo sapiens
catataaggaraccaaggaga

SEQ ID NO: 14906 - DNA, 21 bp, Homo sapiens
gtctctaaatmagaggtgatc

SEQ ID NO: 14907 - DNA, 21 bp, Homo sapiens
gcaagggatgktcatcctctc

SEQ ID NO: 14908 - DNA, 21 bp, Homo sapiens
ctaaaccctcraggggacctg

SEQ ID NO: 14909 - DNA, 21 bp, Homo sapiens
ccgactacacrctgctggatg

SEQ ID NO: 14910 - DNA, 21 bp, Homo sapiens
gaccgtgcagragaggtgaga

SEQ ID NO: 14911 - DNA, 21 bp, Homo sapiens
caggatcgagwattgcacaga

SEQ ID NO: 14912 - DNA, 21 bp, Homo sapiens
cccccaactcrcgctcccaat

SEQ ID NO: 14913 - DNA, 21 bp, Homo sapiens
agacagagacyggaaggcaca

SEQ ID NO: 14914 - DNA, 21 bp, Homo sapiens
gagaaaaaaaraagattaatt

SEQ ID NO: 14915 - DNA, 21 bp, Homo sapiens
tcccatagggktcttcctact

SEQ ID NO: 14916 - DNA, 21 bp, Homo sapiens
taaaagcaggrgataaaaaac

SEQ ID NO: 14917 - DNA, 21 bp, Homo sapiens
gtcattcttcmaagtcagggg

SEQ ID NO: 14918 - DNA, 21 bp, Homo sapiens
atccaggatgyagtgagagcg

SEQ ID NO: 14919 - DNA, 21 bp, Homo sapiens
ggcagccaagsatctcacttg

SEQ ID NO: 14920 - DNA, 21 bp, Homo sapiens
tcagagtgttyctggcagata

SEQ ID NO: 14921 - DNA, 21 bp, Homo sapiens
taaacataaarcttggccact

SEQ ID NO: 14922 - DNA, 21 bp, Homo sapiens
ctcttcagccygtacattact

SEQ ID NO: 14923 - DNA, 21 bp, Homo sapiens
acattcccagyacccggctcc

SEQ ID NO: 14924 - DNA, 21 bp, Homo sapiens
aggggcccgcygcttcctgcc

SEQ ID NO: 14925 - DNA, 21 bp, Homo sapiens
agcagtgtggsagcaggaggg

SEQ ID NO: 14926 - DNA, 21 bp, Homo sapiens
tgctctggctyctgatcatac

SEQ ID NO: 14927 - DNA, 21 bp, Homo sapiens
aagacatacayatggcaggca

SEQ ID NO: 14928 - DNA, 21 bp, Homo sapiens
ttgatgcccaygccaagcact

SEQ ID NO: 14929 - DNA, 21 bp, Homo sapiens
acaagtttttycacttctctg

SEQ ID NO: 14930 - DNA, 21 bp, Homo sapiens
aaaaacccacyctctactccc

SEQ ID NO: 14931 - DNA, 21 bp, Homo sapiens
ggtgctgagcyacagagctaa

SEQ ID NO: 14932 - DNA, 21 bp, Homo sapiens
tgctgagccayagagctaagg

SEQ ID NO: 14933 - DNA, 21 bp, Homo sapiens
aggggcaaagsacactgcccc

SEQ ID NO: 14934 - DNA, 21 bp, Homo sapiens
cattctcctgyctgtagcagt

SEQ ID NO: 14935 - DNA, 21 bp, Homo sapiens
gtggtccaggytgctcactct

SEQ ID NO: 14936 - DNA, 21 bp, Homo sapiens
ctctgggagawggtgggactg

SEQ ID NO: 14937 - DNA, 21 bp, Homo sapiens
gcagagtggcrgcatcgggga

SEQ ID NO: 14938 - DNA, 21 bp, Homo sapiens
gggccgagagracctgaggct

SEQ ID NO: 14939 - DNA, 21 bp, Homo sapiens
aaacgcttctkccacagagac

SEQ ID NO: 14940 - DNA, 21 bp, Homo sapiens
taacaagtcaycactggctgg

SEQ ID NO: 14941 - DNA, 21 bp, Homo sapiens
gctcagaatcyttttcttgag

SEQ ID NO: 14942 - DNA, 21 bp, Homo sapiens
ccagggtgccrctggtcttgc

SEQ ID NO: 14943 - DNA, 21 bp, Homo sapiens
caagagtcatytgcttccaag

SEQ ID NO: 14944 - DNA, 21 bp, Homo sapiens
acctctgcacraagacaaggc

SEQ ID NO: 14945 - DNA, 21 bp, Homo sapiens
gaagatgattytggggatgct

SEQ ID NO: 14946 - DNA, 21 bp, Homo sapiens
tgcagagatgrggttttgccg

SEQ ID NO: 14947 - DNA, 21 bp, Homo sapiens
cactgtctcaygatccatcag

SEQ ID NO: 14948 - DNA, 21 bp, Homo sapiens
cattgtgaggyatccacccta

SEQ ID NO: 14949 - DNA, 21 bp, Homo sapiens
ctgcaagcacrggaccgggac

SEQ ID NO: 14950 - DNA, 21 bp, Homo sapiens
accactctttytgattgggaa

SEQ ID NO: 14951 - DNA, 21 bp, Homo sapiens
gcagcccaatyccaagggact

SEQ ID NO: 14952 - DNA, 21 bp, Homo sapiens
tgtataaggtrcaggctgctc

SEQ ID NO: 14953 - DNA, 21 bp, Homo sapiens
aggtgcagaaygagttcacaa

SEQ ID NO: 14954 - DNA, 21 bp, Homo sapiens
ttaaaagtgcytagttcataa

SEQ ID NO: 14955 - DNA, 21 bp, Homo sapiens
agagacaatgkttcctgtctc

SEQ ID NO: 14956 - DNA, 21 bp, Homo sapiens
ttaatcacacraagccatttc

SEQ ID NO: 14957 - DNA, 21 bp, Homo sapiens
aagatatgtayataaagaaac

SEQ ID NO: 14958 - DNA, 21 bp, Homo sapiens
cacaacagcartaatagctaa

SEQ ID NO: 14959 - DNA, 21 bp, Homo sapiens
caataagaaargagcagctgt

SEQ ID NO: 14960 - DNA, 21 bp, Homo sapiens
gagacttggcrctgtgggaaa

SEQ ID NO: 14961 - DNA, 21 bp, Homo sapiens
cttccatccawcaagtaaaaa

SEQ ID NO: 14962 - DNA, 21 bp, Homo sapiens
attggaaagcygtgagggcct

SEQ ID NO: 14963 - DNA, 21 bp, Homo sapiens
ctctttgtttkgggtccatag

SEQ ID NO: 14964 - DNA, 21 bp, Homo sapiens
tgactcatttrcttctaatta

SEQ ID NO: 14965 - DNA, 21 bp, Homo sapiens
ttgagtcttamgggctttgat

SEQ ID NO: 14966 - DNA, 21 bp, Homo sapiens
ctctcatctayagcagctcgt

SEQ ID NO: 14967 - DNA, 21 bp, Homo sapiens
tgcatgactckgctctttaaa

SEQ ID NO: 14968 - DNA, 21 bp, Homo sapiens
ttttagaaaaygacacatact

SEQ ID NO: 14969 - DNA, 21 bp, Homo sapiens
tggtctcagtracttgctggt

SEQ ID NO: 14970 - DNA, 21 bp, Homo sapiens
agtgttttacrtgtattattc

SEQ ID NO: 14971 - DNA, 21 bp, Homo sapiens
ataaatttttyttggaagaga

SEQ ID NO: 14972 - DNA, 21 bp, Homo sapiens
gcatcaggacratgaaatatt

SEQ ID NO: 14973 - DNA, 21 bp, Homo sapiens
aaaattaagayacccaatcat

SEQ ID NO: 14974 - DNA, 21 bp, Homo sapiens
gtactttcacsttattgaccc

SEQ ID NO: 14975 - DNA, 21 bp, Homo sapiens
tgtattgagaygacaggtact

SEQ ID NO: 14976 - DNA, 21 bp, Homo sapiens
atgtgagagarcaaaccccct

SEQ ID NO: 14977 - DNA, 21 bp, Homo sapiens
aaattcttcaytggacaagga

SEQ ID NO: 14978 - DNA, 21 bp, Homo sapiens
cctaccactcygggtttatct

SEQ ID NO: 14979 - DNA, 21 bp, Homo sapiens
cttactccctrgtcacaggcc

SEQ ID NO: 14980 - DNA, 21 bp, Homo sapiens
ttagaatagtwaacaaaagat

SEQ ID NO: 14981 - DNA, 21 bp, Homo sapiens
gggctcagtgrttatctactc

SEQ ID NO: 14982 - DNA, 21 bp, Homo sapiens
agggagacacygctttgggga

SEQ ID NO: 14983 - DNA, 21 bp, Homo sapiens
tgctatttttyacttttggac

SEQ ID NO: 14984 - DNA, 21 bp, Homo sapiens
taagtgttggytaattctaac

SEQ ID NO: 14985 - DNA, 21 bp, Homo sapiens
agtgtctgatrttcatcccat

SEQ ID NO: 14986 - DNA, 21 bp, Homo sapiens
tttggttcacygatgctttta

SEQ ID NO: 14987 - DNA, 21 bp, Homo sapiens
gaggctgagaygggaagattg

SEQ ID NO: 14988 - DNA, 21 bp, Homo sapiens
tttgcagagcrgaagttttta

SEQ ID NO: 14989 - DNA, 21 bp, Homo sapiens
gctgtcattakctgttatgct

SEQ ID NO: 14990 - DNA, 21 bp, Homo sapiens
acataactctrtgagtgataa

SEQ ID NO: 14991 - DNA, 21 bp, Homo sapiens
tagttgtggtrctgaaatagg

SEQ ID NO: 14992 - DNA, 21 bp, Homo sapiens
gtcagtttctyttctcaggtg

SEQ ID NO: 14993 - DNA, 21 bp, Homo sapiens
gtgttcaactrtgtccaaaaa

SEQ ID NO: 14994 - DNA, 21 bp, Homo sapiens
ctgactccctrttgatcagca

SEQ ID NO: 14995 - DNA, 21 bp, Homo sapiens
gtcctcctgtraggggctcag

SEQ ID NO: 14996 - DNA, 21 bp, Homo sapiens
atgtgttgttragtcaaatgt

SEQ ID NO: 14997 - DNA, 21 bp, Homo sapiens
gtgttagactytagggacaag

SEQ ID NO: 14998 - DNA, 21 bp, Homo sapiens
gtttataatgraaagggatca

SEQ ID NO: 14999 - DNA, 21 bp, Homo sapiens
ctgagtatgcyttaaatgatt

SEQ ID NO: 15000 - DNA, 21 bp, Homo sapiens
ctgtatgcacrtgataactat

SEQ ID NO: 15001 - DNA, 21 bp, Homo sapiens
gattcttacakcataacttac

SEQ ID NO: 15002 - DNA, 21 bp, Homo sapiens
attcttacagsataacttact

SEQ ID NO: 15003 - DNA, 21 bp, Homo sapiens
gagatgaagtracaaataatt

SEQ ID NO: 15004 - DNA, 21 bp, Homo sapiens
tggcttgatayagaggcaatg

SEQ ID NO: 15005 - DNA, 21 bp, Homo sapiens
gattagagagrcaactcaaat

SEQ ID NO: 15006 - DNA, 21 bp, Homo sapiens
aatgaggtatscctgtaatac

SEQ ID NO: 15007 - DNA, 21 bp, Homo sapiens
atcaagattgmagtcctcaag

SEQ ID NO: 15008 - DNA, 21 bp, Homo sapiens
ttgaaacttcytaacttgatg

SEQ ID NO: 15009 - DNA, 21 bp, Homo sapiens
atttgggatayttggacagga

SEQ ID NO: 15010 - DNA, 21 bp, Homo sapiens
tccaaaacttyttgagcacca

SEQ ID NO: 15011 - DNA, 21 bp, Homo sapiens
cccatactackgattcacttc

SEQ ID NO: 15012 - DNA, 21 bp, Homo sapiens
tagggtcttaygtctacataa

SEQ ID NO: 15013 - DNA, 21 bp, Homo sapiens
tatataaactrtgtactaagt

SEQ ID NO: 15014 - DNA, 21 bp, Homo sapiens
ttccaagcaartggcagttac

SEQ ID NO: 15015 - DNA, 21 bp, Homo sapiens
ggaagcacgcrgtgttcattt

SEQ ID NO: 15016 - DNA, 21 bp, Homo sapiens
aaattatatamttagagtaat

SEQ ID NO: 15017 - DNA, 21 bp, Homo sapiens
taaacagctaycactggtgaa

SEQ ID NO: 15018 - DNA, 21 bp, Homo sapiens
ttcttctgcaktaagctttga

SEQ ID NO: 15019 - DNA, 21 bp, Homo sapiens
agaccaagtayaaggctttgg

SEQ ID NO: 15020 - DNA, 21 bp, Homo sapiens
gagataggaarcacatcaagt

SEQ ID NO: 15021 - DNA, 21 bp, Homo sapiens
cagaaattacytgagccagaa

SEQ ID NO: 15022 - DNA, 21 bp, Homo sapiens
tattgaaagcmtggttaagat

SEQ ID NO: 15023 - DNA, 21 bp, Homo sapiens
tgaacacatamaaaggaagat

SEQ ID NO: 15024 - DNA, 21 bp, Homo sapiens
tactgcctgcmtggaggcttt

SEQ ID NO: 15025 - DNA, 21 bp, Homo sapiens
ttcattgttgytcatgtgtga

SEQ ID NO: 15026 - DNA, 21 bp, Homo sapiens
ggggcggtgcrgggagagggc

SEQ ID NO: 15027 - DNA, 21 bp, Homo sapiens
taatttttgayttagtttgga

SEQ ID NO: 15028 - DNA, 21 bp, Homo sapiens
atttttatagsctttcacttg

SEQ ID NO: 15029 - DNA, 21 bp, Homo sapiens
aaaaagttttwcttttgttgt

SEQ ID NO: 15030 - DNA, 21 bp, Homo sapiens
ttctctgcctrtgtatcttcc

SEQ ID NO: 15031 - DNA, 21 bp, Homo sapiens
tagaactaaaygctttcttga

SEQ ID NO: 15032 - DNA, 21 bp, Homo sapiens
tatgagagacrcaagcttccc

SEQ ID NO: 15033 - DNA, 21 bp, Homo sapiens
agcactactarcaacaaaaaa

SEQ ID NO: 15034 - DNA, 21 bp, Homo sapiens
atacagaaaamccaaagaaga

SEQ ID NO: 15035 - DNA, 21 bp, Homo sapiens
gcctgggagcyttaatgagag

SEQ ID NO: 15036 - DNA, 21 bp, Homo sapiens
aaacaactccrgtctttagga

SEQ ID NO: 15037 - DNA, 21 bp, Homo sapiens
agggtgaaggrgacaattaag

SEQ ID NO: 15038 - DNA, 21 bp, Homo sapiens
attttaaccarctccctagta

SEQ ID NO: 15039 - DNA, 21 bp, Homo sapiens
gttatgtttamatttgttaat

SEQ ID NO: 15040 - DNA, 21 bp, Homo sapiens
cctctatctcmgttatctcaa

SEQ ID NO: 15041 - DNA, 21 bp, Homo sapiens
agtttcagatwaggtgtataa

SEQ ID NO: 15042 - DNA, 21 bp, Homo sapiens
ctcatgcagtrgatactttga

SEQ ID NO: 15043 - DNA, 21 bp, Homo sapiens
taatatatccstttacttatt

SEQ ID NO: 15044 - DNA, 21 bp, Homo sapiens
atttggtaacrgaaatacatc

SEQ ID NO: 15045 - DNA, 21 bp, Homo sapiens
aagggaaaaayggctccttac

SEQ ID NO: 15046 - DNA, 21 bp, Homo sapiens
ttcctacttckcattaatgtt

SEQ ID NO: 15047 - DNA, 21 bp, Homo sapiens
atgaacccatkacaagacaat

SEQ ID NO: 15048 - DNA, 21 bp, Homo sapiens
ttttttaagawgtagtatcct

SEQ ID NO: 15049 - DNA, 21 bp, Homo sapiens
acgggggaaawgtgtcaagtt

SEQ ID NO: 15050 - DNA, 21 bp, Homo sapiens
ccacttgatgytgagtttgtg

SEQ ID NO: 15051 - DNA, 21 bp, Homo sapiens
tttaattttaractttctcca

SEQ ID NO: 15052 - DNA, 21 bp, Homo sapiens
ttggttggtcsccagggaaac

SEQ ID NO: 15053 - DNA, 21 bp, Homo sapiens
ttattaatgcyggtaaaatat

SEQ ID NO: 15054 - DNA, 21 bp, Homo sapiens
tctttgtaacrtttgggtctt

SEQ ID NO: 15055 - DNA, 21 bp, Homo sapiens
tgggagagatkttggttttta

SEQ ID NO: 15056 - DNA, 21 bp, Homo sapiens
ctaagctgcaytgtgggtttt

SEQ ID NO: 15057 - DNA, 21 bp, Homo sapiens
attcgatctaraaagtggaac

SEQ ID NO: 15058 - DNA, 21 bp, Homo sapiens
cactctccagragtaccagag

SEQ ID NO: 15059 - DNA, 21 bp, Homo sapiens
ggacatatgcrgtatgtttta

SEQ ID NO: 15060 - DNA, 21 bp, Homo sapiens
gtgaggtgtgkcacagaactc

SEQ ID NO: 15061 - DNA, 21 bp, Homo sapiens
tttaaaaaccrtttgtaccat

SEQ ID NO: 15062 - DNA, 21 bp, Homo sapiens
tagttacacaygacagactga

SEQ ID NO: 15063 - DNA, 21 bp, Homo sapiens
taaatgtggtrtatgccaatg

SEQ ID NO: 15064 - DNA, 21 bp, Homo sapiens
taagattacasattctcaagg

SEQ ID NO: 15065 - DNA, 21 bp, Homo sapiens
aacttaacatytccaatgaaa

SEQ ID NO: 15066 - DNA, 21 bp, Homo sapiens
ctttgacagcrtttgattgat

SEQ ID NO: 15067 - DNA, 21 bp, Homo sapiens
aagaacagccygggcaattgg

SEQ ID NO: 15068 - DNA, 21 bp, Homo sapiens
agtcagtgaargtggaaaggg

SEQ ID NO: 15069 - DNA, 21 bp, Homo sapiens
ggtacgttacwgagtgactat

SEQ ID NO: 15070 - DNA, 21 bp, Homo sapiens
tccatttaccrgttgatgttc

SEQ ID NO: 15071 - DNA, 21 bp, Homo sapiens
tgattaatctkctctgtattg

SEQ ID NO: 15072 - DNA, 21 bp, Homo sapiens
aaggaatatawaaagggggaa

SEQ ID NO: 15073 - DNA, 21 bp, Homo sapiens
tctgtggatcyaatctttcac

SEQ ID NO: 15074 - DNA, 21 bp, Homo sapiens
cacaattttaytggtaattgt

SEQ ID NO: 15075 - DNA, 21 bp, Homo sapiens
ggtcagatgtrgttcccctgt

SEQ ID NO: 15076 - DNA, 21 bp, Homo sapiens
cttataattckgagaataatc

SEQ ID NO: 15077 - DNA, 21 bp, Homo sapiens
acagctaagcrttaataggcc

SEQ ID NO: 15078 - DNA, 21 bp, Homo sapiens
cattgctcackatgtaataca

SEQ ID NO: 15079 - DNA, 21 bp, Homo sapiens
agaacacttcrgacacaggaa

SEQ ID NO: 15080 - DNA, 21 bp, Homo sapiens
taactaatgtytcaatatatc

SEQ ID NO: 15081 - DNA, 21 bp, Homo sapiens
attataaaatrgcctgttttt

SEQ ID NO: 15082 - DNA, 21 bp, Homo sapiens
agtcagtcacrgtcatgaggg

SEQ ID NO: 15083 - DNA, 21 bp, Homo sapiens
tcagaaacaamgaccaataat

SEQ ID NO: 15084 - DNA, 21 bp, Homo sapiens
atttatatgaygggctcgtgt

SEQ ID NO: 15085 - DNA, 21 bp, Homo sapiens
ctttattcacyaaaggagtag

SEQ ID NO: 15086 - DNA, 21 bp, Homo sapiens
ctcctagaagrtgagaccact

SEQ ID NO: 15087 - DNA, 21 bp, Homo sapiens
ttagccgtttmacatctgtag

SEQ ID NO: 15088 - DNA, 21 bp, Homo sapiens
acagcttcagwtattgctgtg

SEQ ID NO: 15089 - DNA, 21 bp, Homo sapiens
acgatgtgaawctgcaaagca

SEQ ID NO: 15090 - DNA, 21 bp, Homo sapiens
ttcttcaataraccaaataag

SEQ ID NO: 15091 - DNA, 21 bp, Homo sapiens
gaagctggaayctgaactttt

SEQ ID NO: 15092 - DNA, 21 bp, Homo sapiens
gcggacagcaytgaggtagac

SEQ ID NO: 15093 - DNA, 21 bp, Homo sapiens
ataaattggayggttatattt

SEQ ID NO: 15094 - DNA, 21 bp, Homo sapiens
gttttttgttygttagttttt

SEQ ID NO: 15095 - DNA, 21 bp, Homo sapiens
aggctcatgaygtgttgacag

SEQ ID NO: 15096 - DNA, 21 bp, Homo sapiens
gaaggtggtcrggggaacacg

SEQ ID NO: 15097 - DNA, 21 bp, Homo sapiens
gcaataaagcraacgctggca

SEQ ID NO: 15098 - DNA, 21 bp, Homo sapiens
tcatgcacagkgggaaacagc

SEQ ID NO: 15099 - DNA, 21 bp, Homo sapiens
tattccttttytacaactagg

SEQ ID NO: 15100 - DNA, 21 bp, Homo sapiens
aaagtgaagaraaggaaaaag

SEQ ID NO: 15101 - DNA, 21 bp, Homo sapiens
aatgtggtccratctgaaagc

SEQ ID NO: 15102 - DNA, 21 bp, Homo sapiens
ggacaaaaagwacatctttgt

SEQ ID NO: 15103 - DNA, 21 bp, Homo sapiens
aattaaccatyctagcatatt

SEQ ID NO: 15104 - DNA, 21 bp, Homo sapiens
ttttgtattcmtgttctaaac

SEQ ID NO: 15105 - DNA, 21 bp, Homo sapiens
ttaattggtaytttgagcatc

SEQ ID NO: 15106 - DNA, 21 bp, Homo sapiens
aatgaggcttrcaaaagacta

SEQ ID NO: 15107 - DNA, 21 bp, Homo sapiens
agcctaggtasctgctgatgc

SEQ ID NO: 15108 - DNA, 21 bp, Homo sapiens
agtgattcctktttatttttt

SEQ ID NO: 15109 - DNA, 21 bp, Homo sapiens
tcctccgaccrgtaccctgca

SEQ ID NO: 15110 - DNA, 21 bp, Homo sapiens
atacattctgmacacaaaggg

SEQ ID NO: 15111 - DNA, 21 bp, Homo sapiens
ccaagggaacrccctcctctg

SEQ ID NO: 15112 - DNA, 21 bp, Homo sapiens
caaggctgaarctagtattac

SEQ ID NO: 15113 - DNA, 21 bp, Homo sapiens
atctcctatckctaccccctt

SEQ ID NO: 15114 - DNA, 21 bp, Homo sapiens
ccagcctgaartaagtaaaga

SEQ ID NO: 15115 - DNA, 21 bp, Homo sapiens
ggcatccaacrcaaacagaca

SEQ ID NO: 15116 - DNA, 21 bp, Homo sapiens
catttctattyctcattccat

SEQ ID NO: 15117 - DNA, 21 bp, Homo sapiens
ttgggaagaasttgcttgctc

SEQ ID NO: 15118 - DNA, 21 bp, Homo sapiens
aaatatgtgtkttttagattc

SEQ ID NO: 15119 - DNA, 21 bp, Homo sapiens
cttttcaaatrtaagtagaga

SEQ ID NO: 15120 - DNA, 21 bp, Homo sapiens
acactcttaastgtgtgctta

SEQ ID NO: 15121 - DNA, 21 bp, Homo sapiens
cagggattccyagggggtcaa

SEQ ID NO: 15122 - DNA, 21 bp, Homo sapiens
catccctgaayggaagatcta

SEQ ID NO: 15123 - DNA, 21 bp, Homo sapiens
agtaatccatytcaagaagcc

SEQ ID NO: 15124 - DNA, 21 bp, Homo sapiens
gctgtccaacsctgaaaggac

SEQ ID NO: 15125 - DNA, 21 bp, Homo sapiens
gagcgagcatmtgtaggggag

SEQ ID NO: 15126 - DNA, 21 bp, Homo sapiens
cctgggtgtaytgtggagcca

SEQ ID NO: 15127 - DNA, 21 bp, Homo sapiens
tatctatcccscaccaaagga

SEQ ID NO: 15128 - DNA, 21 bp, Homo sapiens
ataagagagtrtatagcttta

SEQ ID NO: 15129 - DNA, 21 bp, Homo sapiens
attatctcctyagtcaccagc

SEQ ID NO: 15130 - DNA, 21 bp, Homo sapiens
cggaggcatgsaacagctcgg

SEQ ID NO: 15131 - DNA, 21 bp, Homo sapiens
acttctgcacrcagcctctct

SEQ ID NO: 15132 - DNA, 21 bp, Homo sapiens
tctgggcctcrgttcatccat

SEQ ID NO: 15133 - DNA, 21 bp, Homo sapiens
ggtgcttgatyctcagattct

SEQ ID NO: 15134 - DNA, 21 bp, Homo sapiens
ttcctccccartttgtaatcc

SEQ ID NO: 15135 - DNA, 21 bp, Homo sapiens
gcaattatgtytacagagctt

SEQ ID NO: 15136 - DNA, 21 bp, Homo sapiens
aaattctgtaytcagcctcca

SEQ ID NO: 15137 - DNA, 21 bp, Homo sapiens
cagccccattytctttgctgg

SEQ ID NO: 15138 - DNA, 21 bp, Homo sapiens
agcacctatayatttattcac

SEQ ID NO: 15139 - DNA, 21 bp, Homo sapiens
acatgggctaytgaaggtaat

SEQ ID NO: 15140 - DNA, 21 bp, Homo sapiens
catagaaagcygtgcagcact

SEQ ID NO: 15141 - DNA, 21 bp, Homo sapiens
agtcattaaargggctgaggt

SEQ ID NO: 15142 - DNA, 21 bp, Homo sapiens
ctttgcatttktattgggatt

SEQ ID NO: 15143 - DNA, 21 bp, Homo sapiens
agaagaaaatrcattcaatga

SEQ ID NO: 15144 - DNA, 21 bp, Homo sapiens
aaaaaacaagyagagaaaaat

SEQ ID NO: 15145 - DNA, 21 bp, Homo sapiens
agtggaggagrtaaaatgaga

SEQ ID NO: 15146 - DNA, 21 bp, Homo sapiens
tcattttgatwggcttgatgt

SEQ ID NO: 15147 - DNA, 21 bp, Homo sapiens
taaggcactaytaactatact

SEQ ID NO: 15148 - DNA, 21 bp, Homo sapiens
aaaatactaayatattcaaga

SEQ ID NO: 15149 - DNA, 21 bp, Homo sapiens
tatcctagaaycctggttttc

SEQ ID NO: 15150 - DNA, 21 bp, Homo sapiens
atggcatttartacatccaaa

SEQ ID NO: 15151 - DNA, 21 bp, Homo sapiens
cgtaggttcaygtcttaagaa

SEQ ID NO: 15152 - DNA, 21 bp, Homo sapiens
aatgtctttgyagttcttgga

SEQ ID NO: 15153 - DNA, 21 bp, Homo sapiens
catcagaatcwgttattcttt

SEQ ID NO: 15154 - DNA, 21 bp, Homo sapiens
agacttgatcrtgttccaact

SEQ ID NO: 15155 - DNA, 21 bp, Homo sapiens
aaagggaaggragaaaaagcg

SEQ ID NO: 15156 - DNA, 21 bp, Homo sapiens
cagcaagcacycatctttcag

SEQ ID NO: 15157 - DNA, 21 bp, Homo sapiens
attagtctaayacaggtgacc

SEQ ID NO: 15158 - DNA, 21 bp, Homo sapiens
tggccttttaragagaagaag

SEQ ID NO: 15159 - DNA, 21 bp, Homo sapiens
aatgtcctccrtttaaatgtg

SEQ ID NO: 15160 - DNA, 21 bp, Homo sapiens
ttctaatattsaaaactgatc

SEQ ID NO: 15161 - DNA, 21 bp, Homo sapiens
ttgtactgttkaatcttttat

SEQ ID NO: 15162 - DNA, 21 bp, Homo sapiens
aaaaaatctamccctgaaaca

SEQ ID NO: 15163 - DNA, 21 bp, Homo sapiens
aaatcaatgcrcacattgtaa

SEQ ID NO: 15164 - DNA, 21 bp, Homo sapiens
cgagaacaaamtagagcgaag

SEQ ID NO: 15165 - DNA, 21 bp, Homo sapiens
aaaaacaaaayactgacaaaa

SEQ ID NO: 15166 - DNA, 21 bp, Homo sapiens
tagtcacttartggccatttt

SEQ ID NO: 15167 - DNA, 21 bp, Homo sapiens
ttattgaagtrcagccctttg

SEQ ID NO: 15168 - DNA, 21 bp, Homo sapiens
tgagtaaggtrtgactttcag

SEQ ID NO: 15169 - DNA, 21 bp, Homo sapiens
gtcatcccagyaaataatatg

SEQ ID NO: 15170 - DNA, 21 bp, Homo sapiens
ggtactctgtsacactgaacc

SEQ ID NO: 15171 - DNA, 21 bp, Homo sapiens
acgtaagactrgtgggaactg

SEQ ID NO: 15172 - DNA, 21 bp, Homo sapiens
accagccacasgtttctggcc

SEQ ID NO: 15173 - DNA, 21 bp, Homo sapiens
aaagtgtacartcaatcggtt

SEQ ID NO: 15174 - DNA, 21 bp, Homo sapiens
tggataggatyccaactgttt

SEQ ID NO: 15175 - DNA, 21 bp, Homo sapiens
cccaaaaataycgttccttgc

SEQ ID NO: 15176 - DNA, 21 bp, Homo sapiens
tttgatgattycaaagtgtct

SEQ ID NO: 15177 - DNA, 21 bp, Homo sapiens
gtttctacaaytcaacttttt

SEQ ID NO: 15178 - DNA, 21 bp, Homo sapiens
ttcatttttgrtttagagaga

SEQ ID NO: 15179 - DNA, 21 bp, Homo sapiens
ccagtcctgcragctcctttc

SEQ ID NO: 15180 - DNA, 21 bp, Homo sapiens
ggtgatgagawcattagtgaa

SEQ ID NO: 15181 - DNA, 21 bp, Homo sapiens
aggactctatmtagggaagtc

SEQ ID NO: 15182 - DNA, 21 bp, Homo sapiens
tctcccagtcrataccgaccc

SEQ ID NO: 15183 - DNA, 21 bp, Homo sapiens
agactaaactsaataccaaac

SEQ ID NO: 15184 - DNA, 21 bp, Homo sapiens
ttaaattctayattaaagtct

SEQ ID NO: 15185 - DNA, 21 bp, Homo sapiens
aggcagacacygtataagaaa

SEQ ID NO: 15186 - DNA, 21 bp, Homo sapiens
aaaaattaagmcattccggcc

SEQ ID NO: 15187 - DNA, 21 bp, Homo sapiens
gtcttatggayagtaccacca

SEQ ID NO: 15188 - DNA, 21 bp, Homo sapiens
gagcttgggcrgaactgtatg

SEQ ID NO: 15189 - DNA, 21 bp, Homo sapiens
tgaaaccaccyttgcaaaaat

SEQ ID NO: 15190 - DNA, 21 bp, Homo sapiens
ggttaattggrctttaaaccc

SEQ ID NO: 15191 - DNA, 21 bp, Homo sapiens
ccgttccctaktccagatccc

SEQ ID NO: 15192 - DNA, 21 bp, Homo sapiens
acagaatttgygggaagataa

SEQ ID NO: 15193 - DNA, 21 bp, Homo sapiens
aaggtaatttstcgcagtctt

SEQ ID NO: 15194 - DNA, 21 bp, Homo sapiens
ctcctttccaycttctcttca

SEQ ID NO: 15195 - DNA, 21 bp, Homo sapiens
ctccagagacygaaccgtaag

SEQ ID NO: 15196 - DNA, 21 bp, Homo sapiens
gccaggggttygtttatcaac

SEQ ID NO: 15197 - DNA, 21 bp, Homo sapiens
gcacctcatarctaagtgaaa

SEQ ID NO: 15198 - DNA, 21 bp, Homo sapiens
cattccacaargacgacgaaa

SEQ ID NO: 15199 - DNA, 21 bp, Homo sapiens
aacccagattsttaactatag

SEQ ID NO: 15200 - DNA, 21 bp, Homo sapiens
aattatatgtmtctggacata

SEQ ID NO: 15201 - DNA, 21 bp, Homo sapiens
gcatttcttcrgcttcctgaa

SEQ ID NO: 15202 - DNA, 21 bp, Homo sapiens
aattttgaaamcacactttat

SEQ ID NO: 15203 - DNA, 21 bp, Homo sapiens
taaataattaygttttgtgag

SEQ ID NO: 15204 - DNA, 21 bp, Homo sapiens
ctggctataakagttaataag

SEQ ID NO: 15205 - DNA, 21 bp, Homo sapiens
tgaatcagacrttgtggatac

SEQ ID NO: 15206 - DNA, 21 bp, Homo sapiens
actatctaatrtaatttcctg

SEQ ID NO: 15207 - DNA, 21 bp, Homo sapiens
acttttactcrtccattctcc

SEQ ID NO: 15208 - DNA, 21 bp, Homo sapiens
aaacaagccarttcagtaact

SEQ ID NO: 15209 - DNA, 21 bp, Homo sapiens
agcacataacrgaggatacac

SEQ ID NO: 15210 - DNA, 21 bp, Homo sapiens
ggtgtcttaayagtattaatg

SEQ ID NO: 15211 - DNA, 21 bp, Homo sapiens
tttgctgttawtagaagtatc

SEQ ID NO: 15212 - DNA, 21 bp, Homo sapiens
cacaagttttkagagactttc

SEQ ID NO: 15213 - DNA, 21 bp, Homo sapiens
aaaccatataraattgtatac

SEQ ID NO: 15214 - DNA, 21 bp, Homo sapiens
ctaggtatatrctcaagagaa

SEQ ID NO: 15215 - DNA, 21 bp, Homo sapiens
aaactacctasagagattcaa

SEQ ID NO: 15216 - DNA, 21 bp, Homo sapiens
tggagagtcgrtgtaaaatta

SEQ ID NO: 15217 - DNA, 21 bp, Homo sapiens
tgaagatagaycaaccaacag

SEQ ID NO: 15218 - DNA, 21 bp, Homo sapiens
agaattagtcyctccattacc

SEQ ID NO: 15219 - DNA, 21 bp, Homo sapiens
ttggtacttamttactttgga

SEQ ID NO: 15220 - DNA, 21 bp, Homo sapiens
ttacatctttraaaccccaaa

SEQ ID NO: 15221 - DNA, 21 bp, Homo sapiens
acagggcattkcagaagatgg

SEQ ID NO: 15222 - DNA, 21 bp, Homo sapiens
tatcctctaayaggattttcc

SEQ ID NO: 15223 - DNA, 21 bp, Homo sapiens
tttaatttttwaaaaaatcat

SEQ ID NO: 15224 - DNA, 21 bp, Homo sapiens
tttaacacttycctcatctta

SEQ ID NO: 15225 - DNA, 21 bp, Homo sapiens
acactcttaaycttcttcagt

SEQ ID NO: 15226 - DNA, 21 bp, Homo sapiens
gcctcaagatyagattgccag

SEQ ID NO: 15227 - DNA, 21 bp, Homo sapiens
ccctcatttayagcctctagt

SEQ ID NO: 15228 - DNA, 21 bp, Homo sapiens
ggttaactttraagggaaagc

SEQ ID NO: 15229 - DNA, 21 bp, Homo sapiens
acacagaaagkgggggaaact

SEQ ID NO: 15230 - DNA, 21 bp, Homo sapiens
cacaaggaaarctataggcaa

SEQ ID NO: 15231 - DNA, 21 bp, Homo sapiens
ttgtcttacaraatccacaga

SEQ ID NO: 15232 - DNA, 21 bp, Homo sapiens
tcatggtttayactttccact

SEQ ID NO: 15233 - DNA, 21 bp, Homo sapiens
aggtatgttaygaaattgtcc

SEQ ID NO: 15234 - DNA, 21 bp, Homo sapiens
tgttagatccyggtgtctggg

SEQ ID NO: 15235 - DNA, 21 bp, Homo sapiens
ctaggccaaasgagacatatg

SEQ ID NO: 15236 - DNA, 21 bp, Homo sapiens
acaaaaatgtraaagggaaag

SEQ ID NO: 15237 - DNA, 21 bp, Homo sapiens
tatcaaacccrtaagtaagct

SEQ ID NO: 15238 - DNA, 21 bp, Homo sapiens
aactgaggccytcagccaaga

SEQ ID NO: 15239 - DNA, 21 bp, Homo sapiens
actgagcctgrtaaatctaaa

SEQ ID NO: 15240 - DNA, 21 bp, Homo sapiens
aaaaaaacatrtaaatcatga

SEQ ID NO: 15241 - DNA, 21 bp, Homo sapiens
gtgtagttcarattaatagta

SEQ ID NO: 15242 - DNA, 21 bp, Homo sapiens
gttcacattgkccccatgtca

SEQ ID NO: 15243 - DNA, 21 bp, Homo sapiens
tgtggtgaggktctaccctga

SEQ ID NO: 15244 - DNA, 21 bp, Homo sapiens
aattgataggrcacgtagact

SEQ ID NO: 15245 - DNA, 21 bp, Homo sapiens
ttctttcccargagccccagc

SEQ ID NO: 15246 - DNA, 21 bp, Homo sapiens
aacaatagcawattaatgaga

SEQ ID NO: 15247 - DNA, 21 bp, Homo sapiens
tgggtggttargaaagtccct

SEQ ID NO: 15248 - DNA, 21 bp, Homo sapiens
cattaagaacsctggactgag

SEQ ID NO: 15249 - DNA, 21 bp, Homo sapiens
agggctgaaaygtaaccatcc

SEQ ID NO: 15250 - DNA, 21 bp, Homo sapiens
agcataataamgttgctttat

SEQ ID NO: 15251 - DNA, 21 bp, Homo sapiens
tttaaattctmattagtttct

SEQ ID NO: 15252 - DNA, 21 bp, Homo sapiens
cctttctgatytcatatttct

SEQ ID NO: 15253 - DNA, 21 bp, Homo sapiens
ggattacaagyctgcattttt

SEQ ID NO: 15254 - DNA, 21 bp, Homo sapiens
acctactactstcccttttac

SEQ ID NO: 15255 - DNA, 21 bp, Homo sapiens
aaattttccastttgaatcta

SEQ ID NO: 15256 - DNA, 21 bp, Homo sapiens
taatatttctrcagtaagcag

SEQ ID NO: 15257 - DNA, 21 bp, Homo sapiens
gttccaggtgstgaggattca

SEQ ID NO: 15258 - DNA, 21 bp, Homo sapiens
taaaggagagrtcggaagttc

SEQ ID NO: 15259 - DNA, 21 bp, Homo sapiens
ttaacaacttkgctaaacttt

SEQ ID NO: 15260 - DNA, 21 bp, Homo sapiens
tttttctgctmccttccccca

SEQ ID NO: 15261 - DNA, 21 bp, Homo sapiens
aaattgagatytttaaaagct

SEQ ID NO: 15262 - DNA, 21 bp, Homo sapiens
ttgtgaccacstgaattttca

SEQ ID NO: 15263 - DNA, 21 bp, Homo sapiens
ttttttttttyctctaacacc

SEQ ID NO: 15264 - DNA, 21 bp, Homo sapiens
aagcaatatasactctgcact

SEQ ID NO: 15265 - DNA, 21 bp, Homo sapiens
tatcctgttaytctaactgat

SEQ ID NO: 15266 - DNA, 21 bp, Homo sapiens
tgtgttagaarccagtgttga

SEQ ID NO: 15267 - DNA, 21 bp, Homo sapiens
aatcaaatgtygcaaaggaat

SEQ ID NO: 15268 - DNA, 21 bp, Homo sapiens
atggttttctwaaaaaaggag

SEQ ID NO: 15269 - DNA, 21 bp, Homo sapiens
tgagtagtgaractgcatcag

SEQ ID NO: 15270 - DNA, 21 bp, Homo sapiens
atgctgctatmagcttctatt

SEQ ID NO: 15271 - DNA, 21 bp, Homo sapiens
caaaataaggraccctggagg

SEQ ID NO: 15272 - DNA, 21 bp, Homo sapiens
gcactgtctarggcctctagt

SEQ ID NO: 15273 - DNA, 21 bp, Homo sapiens
agtactgggartgaaccgcct

SEQ ID NO: 15274 - DNA, 21 bp, Homo sapiens
aatactcatarttatctttta

SEQ ID NO: 15275 - DNA, 21 bp, Homo sapiens
tgtggaaactrttgttcatat

SEQ ID NO: 15276 - DNA, 21 bp, Homo sapiens
ttttctcttcwaaattaaaag

SEQ ID NO: 15277 - DNA, 21 bp, Homo sapiens
atttaaatatmccataatctg

SEQ ID NO: 15278 - DNA, 21 bp, Homo sapiens
aaccgaattcyttagtataag

SEQ ID NO: 15279 - DNA, 21 bp, Homo sapiens
tatgctcttgmcaatgtcttt

SEQ ID NO: 15280 - DNA, 21 bp, Homo sapiens
agatcagtggygaagcacaag

SEQ ID NO: 15281 - DNA, 21 bp, Homo sapiens
ctgtagaaagyctgtccccta

SEQ ID NO: 15282 - DNA, 21 bp, Homo sapiens
ctagatctgcyttaggatttt

SEQ ID NO: 15283 - DNA, 21 bp, Homo sapiens
tgtatacattrttaccacttt

SEQ ID NO: 15284 - DNA, 21 bp, Homo sapiens
aacttatttartggccttata

SEQ ID NO: 15285 - DNA, 21 bp, Homo sapiens
ttattcttttrctttcatgtt

SEQ ID NO: 15286 - DNA, 21 bp, Homo sapiens
tgtgggtaggrtgctttgact

SEQ ID NO: 15287 - DNA, 21 bp, Homo sapiens
tattaaaagtrcatcaaaagg

SEQ ID NO: 15288 - DNA, 21 bp, Homo sapiens
ttgcagttttwatgtatatat

SEQ ID NO: 15289 - DNA, 21 bp, Homo sapiens
actcaacctayaccattctct

SEQ ID NO: 15290 - DNA, 21 bp, Homo sapiens
ggtgctatttratatatagac

SEQ ID NO: 15291 - DNA, 21 bp, Homo sapiens
ataatgctacrggtttgattt

SEQ ID NO: 15292 - DNA, 21 bp, Homo sapiens
gcaccatgctyagtgctttgc

SEQ ID NO: 15293 - DNA, 21 bp, Homo sapiens
ttaaataactrtagttttatt

SEQ ID NO: 15294 - DNA, 21 bp, Homo sapiens
cccgctcgctygcttacacat

SEQ ID NO: 15295 - DNA, 21 bp, Homo sapiens
gttttaattartaagctttat

SEQ ID NO: 15296 - DNA, 21 bp, Homo sapiens
tttatcagcakttagtagttt

SEQ ID NO: 15297 - DNA, 21 bp, Homo sapiens
ttcgttgtgtygttttgcagc

SEQ ID NO: 15298 - DNA, 21 bp, Homo sapiens
ctgttgcttargtaaatctaa

SEQ ID NO: 15299 - DNA, 21 bp, Homo sapiens
atatgtacatrtaggagtttg

SEQ ID NO: 15300 - DNA, 21 bp, Homo sapiens
ataattagaartagaagcata

SEQ ID NO: 15301 - DNA, 21 bp, Homo sapiens
taggtataccrtttatgctga

SEQ ID NO: 15302 - DNA, 21 bp, Homo sapiens
ttttatttaaygatgaatatt

SEQ ID NO: 15303 - DNA, 21 bp, Homo sapiens
tgttcaggatkgtacaagggc

SEQ ID NO: 15304 - DNA, 21 bp, Homo sapiens
catgaataccraaggcagatt

SEQ ID NO: 15305 - DNA, 21 bp, Homo sapiens
aaggtttcatracccagtgtt

SEQ ID NO: 15306 - DNA, 21 bp, Homo sapiens
gtatagttgtrtaaaaaaact

SEQ ID NO: 15307 - DNA, 21 bp, Homo sapiens
tggtttgtgtratttgggggt

SEQ ID NO: 15308 - DNA, 21 bp, Homo sapiens
gctgcagatgrtgaggaaata

SEQ ID NO: 15309 - DNA, 21 bp, Homo sapiens
aaaattatgtraaatgagtta

SEQ ID NO: 15310 - DNA, 21 bp, Homo sapiens
taaatagtttmtggttctgac

SEQ ID NO: 15311 - DNA, 21 bp, Homo sapiens
tgcatcatcaytgttgagtca

SEQ ID NO: 15312 - DNA, 21 bp, Homo sapiens
cgtaggttttyaaaaaaccat

SEQ ID NO: 15313 - DNA, 21 bp, Homo sapiens
tgtttgaattygttggtgtag

SEQ ID NO: 15314 - DNA, 21 bp, Homo sapiens
tgaacacccaygcatttatta

SEQ ID NO: 15315 - DNA, 21 bp, Homo sapiens
gaaagtttagygtccttgcta

SEQ ID NO: 15316 - DNA, 21 bp, Homo sapiens
ttgagtcttakaatggcagta

SEQ ID NO: 15317 - DNA, 21 bp, Homo sapiens
tgttttcagastttacctgga

SEQ ID NO: 15318 - DNA, 21 bp, Homo sapiens
cttccctcccscttttggagt

SEQ ID NO: 15319 - DNA, 21 bp, Homo sapiens
agcatgtcttrtagggtcaat

SEQ ID NO: 15320 - DNA, 21 bp, Homo sapiens
gttccatggtyggggatgtgg

SEQ ID NO: 15321 - DNA, 21 bp, Homo sapiens
ttttgggtccrtttctcttgt

SEQ ID NO: 15322 - DNA, 21 bp, Homo sapiens
ttgaggaacgytgatgtgttt

SEQ ID NO: 15323 - DNA, 21 bp, Homo sapiens
acatagtttaygttaagtgcc

SEQ ID NO: 15324 - DNA, 21 bp, Homo sapiens
agattgtataygaaaagctga

SEQ ID NO: 15325 - DNA, 21 bp, Homo sapiens
ttaagcaaatyaatggagaaa

SEQ ID NO: 15326 - DNA, 21 bp, Homo sapiens
tgcttgggacyagaagtcttt

SEQ ID NO: 15327 - DNA, 21 bp, Homo sapiens
ccacactacaraaatgtttta

SEQ ID NO: 15328 - DNA, 21 bp, Homo sapiens
tatcaatcacyttcatcctag

SEQ ID NO: 15329 - DNA, 21 bp, Homo sapiens
acaagtttatyttgtcctcac

SEQ ID NO: 15330 - DNA, 21 bp, Homo sapiens
ggccaggtggytggggagagg

SEQ ID NO: 15331 - DNA, 21 bp, Homo sapiens
tattgtttgartaacagtaag

SEQ ID NO: 15332 - DNA, 21 bp, Homo sapiens
cttatcccaaraatgcaaggc

SEQ ID NO: 15333 - DNA, 21 bp, Homo sapiens
gctagattttraacatttacc

SEQ ID NO: 15334 - DNA, 21 bp, Homo sapiens
ctctaaaataygggaagttct

SEQ ID NO: 15335 - DNA, 21 bp, Homo sapiens
gttattcagtrttattaactg

SEQ ID NO: 15336 - DNA, 21 bp, Homo sapiens
aaatttttttwaaaaatatta

SEQ ID NO: 15337 - DNA, 21 bp, Homo sapiens
tttgttctttktccttctccc

SEQ ID NO: 15338 - DNA, 21 bp, Homo sapiens
caaacttgcakctttaggaaa

SEQ ID NO: 15339 - DNA, 21 bp, Homo sapiens
tttcctctctstactgtggag

SEQ ID NO: 15340 - DNA, 21 bp, Homo sapiens
tgatgtttgtstagcagtttt

SEQ ID NO: 15341 - DNA, 21 bp, Homo sapiens
gtatgataagygtcatacaaa

SEQ ID NO: 15342 - DNA, 21 bp, Homo sapiens
aaattgtgttytctatgtaga

SEQ ID NO: 15343 - DNA, 21 bp, Homo sapiens
cagaatttccstctattactc

SEQ ID NO: 15344 - DNA, 21 bp, Homo sapiens
tgccagcttgmcagccactta

SEQ ID NO: 15345 - DNA, 21 bp, Homo sapiens
ttttaacttaygttgatcagt

SEQ ID NO: 15346 - DNA, 21 bp, Homo sapiens
acaacaagacwgggatcaggg

SEQ ID NO: 15347 - DNA, 21 bp, Homo sapiens
cttttctaggkaatttttgcc

SEQ ID NO: 15348 - DNA, 21 bp, Homo sapiens
tatccaaaagrtaacaggaaa

SEQ ID NO: 15349 - DNA, 21 bp, Homo sapiens
atccctttatrccactctccc

SEQ ID NO: 15350 - DNA, 21 bp, Homo sapiens
acaaggttctrtgttgtggcc

SEQ ID NO: 15351 - DNA, 21 bp, Homo sapiens
gttctttccartgaaaggaat

SEQ ID NO: 15352 - DNA, 21 bp, Homo sapiens
ttgctctctcrtaggtttcct

SEQ ID NO: 15353 - DNA, 21 bp, Homo sapiens
tagggagcaaktaaaattaat

SEQ ID NO: 15354 - DNA, 21 bp, Homo sapiens
ccataaaagcyccatggtgag

SEQ ID NO: 15355 - DNA, 21 bp, Homo sapiens
tcatgaaagtygatctttatt

SEQ ID NO: 15356 - DNA, 21 bp, Homo sapiens
aaaataacacygtgttgatgc

SEQ ID NO: 15357 - DNA, 21 bp, Homo sapiens
ctgtagttatyatctttctaa

SEQ ID NO: 15358 - DNA, 21 bp, Homo sapiens
catgcaagtcwtttggtacat

SEQ ID NO: 15359 - DNA, 21 bp, Homo sapiens
tgagtttaagycactgttcat

SEQ ID NO: 15360 - DNA, 21 bp, Homo sapiens
ccaggatatargctctgtcca

SEQ ID NO: 15361 - DNA, 21 bp, Homo sapiens
ggaaccagccmtaaacactaa

SEQ ID NO: 15362 - DNA, 21 bp, Homo sapiens
caactagtacmgaatttggtg

SEQ ID NO: 15363 - DNA, 21 bp, Homo sapiens
cagacctgtasaatagagttc

SEQ ID NO: 15364 - DNA, 21 bp, Homo sapiens
cagccttccgygagttggagt

SEQ ID NO: 15365 - DNA, 21 bp, Homo sapiens
ttgaggatagygtttttttct

SEQ ID NO: 15366 - DNA, 21 bp, Homo sapiens
tctgtcagtckgcaggtcaag

SEQ ID NO: 15367 - DNA, 21 bp, Homo sapiens
catttttatcyttaatttgag

SEQ ID NO: 15368 - DNA, 21 bp, Homo sapiens
ggtcacacctytccttcagat

SEQ ID NO: 15369 - DNA, 21 bp, Homo sapiens
ttccttggatrgttcaagaac

SEQ ID NO: 15370 - DNA, 21 bp, Homo sapiens
tttcttctctrcatttttttt

SEQ ID NO: 15371 - DNA, 21 bp, Homo sapiens
tgtagagaatrtttgtagtgt

SEQ ID NO: 15372 - DNA, 21 bp, Homo sapiens
gagaaatataygttaacgcat

SEQ ID NO: 15373 - DNA, 21 bp, Homo sapiens
gatgttagaaraccaaagtca

SEQ ID NO: 15374 - DNA, 21 bp, Homo sapiens
cttgtgtaacrtcttaatatt

SEQ ID NO: 15375 - DNA, 21 bp, Homo sapiens
catattaaatkatatataatg

SEQ ID NO: 15376 - DNA, 21 bp, Homo sapiens
ttctgtaaaarttccaggagt

SEQ ID NO: 15377 - DNA, 21 bp, Homo sapiens
gtcttgctagkctacacattc

SEQ ID NO: 15378 - DNA, 21 bp, Homo sapiens
tctctacactrcatttcctta

SEQ ID NO: 15379 - DNA, 21 bp, Homo sapiens
ttgcaactctkaagttttgct

SEQ ID NO: 15380 - DNA, 21 bp, Homo sapiens
aggtccaagayagagcatatg

SEQ ID NO: 15381 - DNA, 21 bp, Homo sapiens
acatctgtccrgttgttgtaa

SEQ ID NO: 15382 - DNA, 21 bp, Homo sapiens
acctcatttarccttcaaaac

SEQ ID NO: 15383 - DNA, 21 bp, Homo sapiens
aatttaggaaytcagcagaaa

SEQ ID NO: 15384 - DNA, 21 bp, Homo sapiens
aaatttttctytggtcaggac

SEQ ID NO: 15385 - DNA, 21 bp, Homo sapiens
caaacccactyagttttttta

SEQ ID NO: 15386 - DNA, 21 bp, Homo sapiens
gttatttatgrctttgggaga

SEQ ID NO: 15387 - DNA, 21 bp, Homo sapiens
accaaaccccyagtgtaaggt

SEQ ID NO: 15388 - DNA, 21 bp, Homo sapiens
aaattaagagratggagaaaa

SEQ ID NO: 15389 - DNA, 21 bp, Homo sapiens
ataaaggtctktaaagatact

SEQ ID NO: 15390 - DNA, 21 bp, Homo sapiens
ttggttgaacwcattctcctc

SEQ ID NO: 15391 - DNA, 21 bp, Homo sapiens
ttctgtgtacyccagcatggt

SEQ ID NO: 15392 - DNA, 21 bp, Homo sapiens
ctacttttcaycgtcttagcc

SEQ ID NO: 15393 - DNA, 21 bp, Homo sapiens
tgaatgtaaayggtctaaaca

SEQ ID NO: 15394 - DNA, 21 bp, Homo sapiens
tcttccctgcytccctacaat

SEQ ID NO: 15395 - DNA, 21 bp, Homo sapiens
ttgtttccaarcccatcatta

SEQ ID NO: 15396 - DNA, 21 bp, Homo sapiens
tctgcacagtrgaacataaag

SEQ ID NO: 15397 - DNA, 21 bp, Homo sapiens
cagcttcattygcaatagcca

SEQ ID NO: 15398 - DNA, 21 bp, Homo sapiens
atttcaccacrttatgttctc

SEQ ID NO: 15399 - DNA, 21 bp, Homo sapiens
taggctaaatytccttttgga

SEQ ID NO: 15400 - DNA, 21 bp, Homo sapiens
atgattgtttrtagactgtag

SEQ ID NO: 15401 - DNA, 21 bp, Homo sapiens
agaaggagtcrgagtggtctg

SEQ ID NO: 15402 - DNA, 21 bp, Homo sapiens
ttttgccttcygttcatcttt

SEQ ID NO: 15403 - DNA, 21 bp, Homo sapiens
gacagcccttytgcttagtta

SEQ ID NO: 15404 - DNA, 21 bp, Homo sapiens
ttatattactrtatcacctgt

SEQ ID NO: 15405 - DNA, 21 bp, Homo sapiens
aaaaagcactrtctacaacag

SEQ ID NO: 15406 - DNA, 21 bp, Homo sapiens
attagggggcmcaatgtgaat

SEQ ID NO: 15407 - DNA, 21 bp, Homo sapiens
ggatggctctstagaattagg

SEQ ID NO: 15408 - DNA, 21 bp, Homo sapiens
ataactgaacrtggttaattt

SEQ ID NO: 15409 - DNA, 21 bp, Homo sapiens
atttatgagtyctcttctgaa

SEQ ID NO: 15410 - DNA, 21 bp, Homo sapiens
aacagctctcygtggtccacc

SEQ ID NO: 15411 - DNA, 21 bp, Homo sapiens
ggacctatagstagtcattcc

SEQ ID NO: 15412 - DNA, 21 bp, Homo sapiens
aagcactttaratgtgtcaac

SEQ ID NO: 15413 - DNA, 21 bp, Homo sapiens
aattggaggcmggaaagttgg

SEQ ID NO: 15414 - DNA, 21 bp, Homo sapiens
ctcactctccrtcacttaccc

SEQ ID NO: 15415 - DNA, 21 bp, Homo sapiens
cctagtgcaargtcaggaagg

SEQ ID NO: 15416 - DNA, 21 bp, Homo sapiens
attttttaagkacagtgtata

SEQ ID NO: 15417 - DNA, 21 bp, Homo sapiens
agacgttgttyagatgaatat

SEQ ID NO: 15418 - DNA, 21 bp, Homo sapiens
ccttatggaayatggttcctc

SEQ ID NO: 15419 - DNA, 21 bp, Homo sapiens
aaattctgacrttgcctggtt

SEQ ID NO: 15420 - DNA, 21 bp, Homo sapiens
ctcctaaacakcttgcttaaa

SEQ ID NO: 15421 - DNA, 21 bp, Homo sapiens
ccaaactatcrtcaaacgcat

SEQ ID NO: 15422 - DNA, 21 bp, Homo sapiens
gatgctgcccrtgcagaggtc

SEQ ID NO: 15423 - DNA, 21 bp, Homo sapiens
tccccgagaaractgggtcac

SEQ ID NO: 15424 - DNA, 21 bp, Homo sapiens
gtgcctagagrgaaactgtta

SEQ ID NO: 15425 - DNA, 21 bp, Homo sapiens
tcatcagatayacagtttgca

SEQ ID NO: 15426 - DNA, 21 bp, Homo sapiens
gaagaagtaaractgtttcta

SEQ ID NO: 15427 - DNA, 21 bp, Homo sapiens
agtggctaagkggtacagggt

SEQ ID NO: 15428 - DNA, 21 bp, Homo sapiens
aagttggtttygttggcttac

SEQ ID NO: 15429 - DNA, 21 bp, Homo sapiens
ttcagcctatstgggcattta

SEQ ID NO: 15430 - DNA, 21 bp, Homo sapiens
tctgtgggcasgctgttagca

SEQ ID NO: 15431 - DNA, 21 bp, Homo sapiens
tgtacccccgygactcagctg

SEQ ID NO: 15432 - DNA, 21 bp, Homo sapiens
gaaaacccttkgagatcctag

SEQ ID NO: 15433 - DNA, 21 bp, Homo sapiens
gttcctttgtycaggtattta

SEQ ID NO: 15434 - DNA, 21 bp, Homo sapiens
taaaccctccygttatttcca

SEQ ID NO: 15435 - DNA, 21 bp, Homo sapiens
accatctaatmgaatcttcaa

SEQ ID NO: 15436 - DNA, 21 bp, Homo sapiens
tagcagttagrgaatagcaca

SEQ ID NO: 15437 - DNA, 21 bp, Homo sapiens
gttccctaccyccatgcccgt

SEQ ID NO: 15438 - DNA, 21 bp, Homo sapiens
aaatctactcygtgttaggct

SEQ ID NO: 15439 - DNA, 21 bp, Homo sapiens
gataaaaatayacaactggaa

SEQ ID NO: 15440 - DNA, 21 bp, Homo sapiens
taagatataarctgtggccca

SEQ ID NO: 15441 - DNA, 21 bp, Homo sapiens
gtttttgttaragacactgaa

SEQ ID NO: 15442 - DNA, 21 bp, Homo sapiens
atataagaccrtgtcctgcgt

SEQ ID NO: 15443 - DNA, 21 bp, Homo sapiens
aaagcacgtargagacaaggg

SEQ ID NO: 15444 - DNA, 21 bp, Homo sapiens
tttggccaccrctctcaaatt

SEQ ID NO: 15445 - DNA, 21 bp, Homo sapiens
aaggcaaattyttatcagtcc

SEQ ID NO: 15446 - DNA, 21 bp, Homo sapiens
gatttggatarcaatttttgg

SEQ ID NO: 15447 - DNA, 21 bp, Homo sapiens
gcactgatgtkagtgtcccgt

SEQ ID NO: 15448 - DNA, 21 bp, Homo sapiens
catgttggtcygaaatatgcc

SEQ ID NO: 15449 - DNA, 21 bp, Homo sapiens
tcaagaattcytacttctgaa

SEQ ID NO: 15450 - DNA, 21 bp, Homo sapiens
ataaactctcragtgttatag

SEQ ID NO: 15451 - DNA, 21 bp, Homo sapiens
gcttcattcartgttttccag

SEQ ID NO: 15452 - DNA, 21 bp, Homo sapiens
atcctcaaacscaggtaaaat

SEQ ID NO: 15453 - DNA, 21 bp, Homo sapiens
ctatcagttayttaatcaatg

SEQ ID NO: 15454 - DNA, 21 bp, Homo sapiens
gggttggcctmcagcctagtc

SEQ ID NO: 15455 - DNA, 21 bp, Homo sapiens
gtgtacttaaygttaattgtg

SEQ ID NO: 15456 - DNA, 21 bp, Homo sapiens
catgagggtayctagcatcta

SEQ ID NO: 15457 - DNA, 21 bp, Homo sapiens
gtagaggatgkaaagggtctg

SEQ ID NO: 15458 - DNA, 21 bp, Homo sapiens
atgtgtttgcrtggcattgtt

SEQ ID NO: 15459 - DNA, 21 bp, Homo sapiens
aaattgaatarcatcagctgc

SEQ ID NO: 15460 - DNA, 21 bp, Homo sapiens
gtttacagcaycagattagct

SEQ ID NO: 15461 - DNA, 21 bp, Homo sapiens
aatgattattkatttaggggg

SEQ ID NO: 15462 - DNA, 21 bp, Homo sapiens
ctattgaaccrcccttgccag

SEQ ID NO: 15463 - DNA, 21 bp, Homo sapiens
ttgcctgttayataggattgc

SEQ ID NO: 15464 - DNA, 21 bp, Homo sapiens
acattgcacakcgtgaggggg

SEQ ID NO: 15465 - DNA, 21 bp, Homo sapiens
tgcatggtttrtcttgatgaa

SEQ ID NO: 15466 - DNA, 21 bp, Homo sapiens
aggagaggccygtatggagtc

SEQ ID NO: 15467 - DNA, 21 bp, Homo sapiens
accatatgccrtttctggtac

SEQ ID NO: 15468 - DNA, 21 bp, Homo sapiens
atttcctaagrtgaggaggtg

SEQ ID NO: 15469 - DNA, 21 bp, Homo sapiens
agcaaatcatraatttatttc

SEQ ID NO: 15470 - DNA, 21 bp, Homo sapiens
gatggtactaytgcagagtcc

SEQ ID NO: 15471 - DNA, 21 bp, Homo sapiens
ggaagtcagcrggaccccaag

SEQ ID NO: 15472 - DNA, 21 bp, Homo sapiens
gttgagccccraggaggttat

SEQ ID NO: 15473 - DNA, 21 bp, Homo sapiens
gtgcgggggtktgttgcctct

SEQ ID NO: 15474 - DNA, 21 bp, Homo sapiens
gagaggaatgwcactcatcgc

SEQ ID NO: 15475 - DNA, 21 bp, Homo sapiens
aaatccagatsccctccacgt

SEQ ID NO: 15476 - DNA, 21 bp, Homo sapiens
tgcccagttgsttcagccaca

SEQ ID NO: 15477 - DNA, 21 bp, Homo sapiens
tgctataggaraagatgatcc

SEQ ID NO: 15478 - DNA, 21 bp, Homo sapiens
acatttagccrtttcccctta

SEQ ID NO: 15479 - DNA, 21 bp, Homo sapiens
agcgcgccccwccaaggcagg

SEQ ID NO: 15480 - DNA, 21 bp, Homo sapiens
agagtgcatgsccttacttgt

SEQ ID NO: 15481 - DNA, 21 bp, Homo sapiens
tataaatcggktgctttagga

SEQ ID NO: 15482 - DNA, 21 bp, Homo sapiens
aaataattttwaaaaatttca

SEQ ID NO: 15483 - DNA, 21 bp, Homo sapiens
taagtcgatgycatggaaaga

SEQ ID NO: 15484 - DNA, 21 bp, Homo sapiens
acatttgctgrgtcggaagac

SEQ ID NO: 15485 - DNA, 21 bp, Homo sapiens
gccttccgctrgcatgcttag

SEQ ID NO: 15486 - DNA, 21 bp, Homo sapiens
ttctaatctgrcaatgtcctt

SEQ ID NO: 15487 - DNA, 21 bp, Homo sapiens
cgcaggtacgrgtgaagaaac

SEQ ID NO: 15488 - DNA, 21 bp, Homo sapiens
aaaccaaagtrcgtgcctaaa

SEQ ID NO: 15489 - DNA, 21 bp, Homo sapiens
tagaccaattrtgaagccact

SEQ ID NO: 15490 - DNA, 21 bp, Homo sapiens
agttattacastctctctatt

SEQ ID NO: 15491 - DNA, 21 bp, Homo sapiens
agagatctgcrgttttcttaa

SEQ ID NO: 15492 - DNA, 21 bp, Homo sapiens
ggaaggcctgrattccaccca

SEQ ID NO: 15493 - DNA, 21 bp, Homo sapiens
tgtgtcactgrgtgtgcacag

SEQ ID NO: 15494 - DNA, 21 bp, Homo sapiens
ggtaaatggckatttgtctaa

SEQ ID NO: 15495 - DNA, 21 bp, Homo sapiens
tagtagtttgrtgacttcact

SEQ ID NO: 15496 - DNA, 21 bp, Homo sapiens
acaaaatctgyttctaaatct

SEQ ID NO: 15497 - DNA, 21 bp, Homo sapiens
aatggctaacmcatccgagaa

SEQ ID NO: 15498 - DNA, 21 bp, Homo sapiens
ttctaattacrttggtgaaag

SEQ ID NO: 15499 - DNA, 21 bp, Homo sapiens
tgtcgttagaytgtgacctca

SEQ ID NO: 15500 - DNA, 21 bp, Homo sapiens
tcgttcatcawcgtcctcaac

SEQ ID NO: 15501 - DNA, 21 bp, Homo sapiens
tggaaatttgyggttgccttg

SEQ ID NO: 15502 - DNA, 21 bp, Homo sapiens
tctaaaacatkgcaagagcaa

SEQ ID NO: 15503 - DNA, 21 bp, Homo sapiens
gagggtcagtratcacagaga

SEQ ID NO: 15504 - DNA, 21 bp, Homo sapiens
tagtggtctcrgcctacagtc

SEQ ID NO: 15505 - DNA, 21 bp, Homo sapiens
aggtcctgcaktttgcttcag

SEQ ID NO: 15506 - DNA, 21 bp, Homo sapiens
aaatcaattcrgttcagtctt

SEQ ID NO: 15507 - DNA, 21 bp, Homo sapiens
gaaggaaattytgccattgcg

SEQ ID NO: 15508 - DNA, 21 bp, Homo sapiens
gtgatctcacytatatgcaga

SEQ ID NO: 15509 - DNA, 21 bp, Homo sapiens
acttatatgcrgaatctgaaa

SEQ ID NO: 15510 - DNA, 21 bp, Homo sapiens
tgtataataayttcacaaaat

SEQ ID NO: 15511 - DNA, 21 bp, Homo sapiens
gcctgtaatcycagcactttg

SEQ ID NO: 15512 - DNA, 21 bp, Homo sapiens
taatgttttacgtgtaattta

SEQ ID NO: 15513 - DNA, 20 bp, Homo sapiens
taatgttttagtgtaattta

SEQ ID NO: 15514 - DNA, 20 bp, Homo sapiens
aacaacagctcggctttggt

SEQ ID NO: 15515 - DNA, 21 bp, Homo sapiens
aacaacagcttcggctttggt

SEQ ID NO: 15516 - DNA, 21 bp, Homo sapiens
tggtgaactayatgaactgta

SEQ ID NO: 15517 - DNA, 21 bp, Homo sapiens
caaatggaaartctgcagcct

SEQ ID NO: 15518 - DNA, 21 bp, Homo sapiens
ttttctgctcwgttctttccc

SEQ ID NO: 15519 - DNA, 21 bp, Homo sapiens
tttgtggttttatctatcttt

SEQ ID NO: 15520 - DNA, 20 bp, Homo sapiens
tttgtggtttatctatcttt

SEQ ID NO: 15521 - DNA, 21 bp, Homo sapiens
ttctgtttgtkagttttcctt

SEQ ID NO: 15522 - DNA, 21 bp, Homo sapiens
cgccctgcttyggctcacact

SEQ ID NO: 15523 - DNA, 21 bp, Homo sapiens
catcttggctygggaccagag

SEQ ID NO: 15524 - DNA, 21 bp, Homo sapiens
ctagcctgggygacagaacaa

SEQ ID NO: 15525 - DNA, 21 bp, Homo sapiens
cgccaccacgyccagctgatt

SEQ ID NO: 15526 - DNA, 21 bp, Homo sapiens
gcagatggatmacttgaggtc

SEQ ID NO: 15527 - DNA, 21 bp, Homo sapiens
taaatggagtkggataccgtc

SEQ ID NO: 15528 - DNA, 21 bp, Homo sapiens
atccaacagtrtctgccatag

SEQ ID NO: 15529 - DNA, 21 bp, Homo sapiens
aatacaaaaaytagccaggcg

SEQ ID NO: 15530 - DNA, 21 bp, Homo sapiens
actagccaggygtgttggcgg

SEQ ID NO: 15531 - DNA, 21 bp, Homo sapiens
aggcctcctcrtgttggggtg

SEQ ID NO: 15532 - DNA, 21 bp, Homo sapiens
ctccttgctgytctttgaaca

SEQ ID NO: 15533 - DNA, 21 bp, Homo sapiens
cctgcctcagrgcctttgcat

SEQ ID NO: 15534 - DNA, 21 bp, Homo sapiens
aacctttttamtccgctttag

SEQ ID NO: 15535 - DNA, 21 bp, Homo sapiens
cataagcacgrttcatcatat

SEQ ID NO: 15536 - DNA, 21 bp, Homo sapiens
aattgggcatrgtagtacgtg

SEQ ID NO: 15537 - DNA, 21 bp, Homo sapiens
tgcagtggtgygatctcggct

SEQ ID NO: 15538 - DNA, 21 bp, Homo sapiens
ctcctcctccygggttcacgc

SEQ ID NO: 15539 - DNA, 21 bp, Homo sapiens
cgcccggctartttctttttg

SEQ ID NO: 15540 - DNA, 21 bp, Homo sapiens
atttttggtaragacagggtt

SEQ ID NO: 15541 - DNA, 21 bp, Homo sapiens
agtgctgggaytacaagcgtg

SEQ ID NO: 15542 - DNA, 21 bp, Homo sapiens
gccaccaattwttgtattttt

SEQ ID NO: 15543 - DNA, 20 bp, Homo sapiens
tggctgggccggtggctcac

SEQ ID NO: 15544 - DNA, 21 bp, Homo sapiens
tggctgggcccggtggctcac

SEQ ID NO: 15545 - DNA, 21 bp, Homo sapiens
tttgggaggtsgaggtgggcg

SEQ ID NO: 15546 - DNA, 21 bp, Homo sapiens
cttcttattttcaagcattgt

SEQ ID NO: 15547 - DNA, 20 bp, Homo sapiens
cttcttatttcaagcattgt

SEQ ID NO: 15548 - DNA, 21 bp, Homo sapiens
agcactttctkatgtgctaac

SEQ ID NO: 15549 - DNA, 21 bp, Homo sapiens
ccaggctggartgcagttgca

SEQ ID NO: 15550 - DNA, 21 bp, Homo sapiens
gtatttcaggsgtgagccacc

SEQ ID NO: 15551 - DNA, 21 bp, Homo sapiens
agccaccatgwccggcctgaa

SEQ ID NO: 15552 - DNA, 21 bp, Homo sapiens
ttcctccaccwcctcctcctc

SEQ ID NO: 15553 - DNA, 21 bp, Homo sapiens
tacttctcccsattatataaa

SEQ ID NO: 15554 - DNA, 21 bp, Homo sapiens
gagtctcgctstgtcgcccag

SEQ ID NO: 15555 - DNA, 21 bp, Homo sapiens
ctggagtgcastggcgcgatc

SEQ ID NO: 15556 - DNA, 21 bp, Homo sapiens
agtgcagtggygcgatctcgg

SEQ ID NO: 15557 - DNA, 21 bp, Homo sapiens
tgatcggcccrcctcgacctc

SEQ ID NO: 15558 - DNA, 21 bp, Homo sapiens
atctcagctcrctgcaacctc

SEQ ID NO: 15559 - DNA, 21 bp, Homo sapiens
tgagccactgygtccagcctg

SEQ ID NO: 15560 - DNA, 21 bp, Homo sapiens
ccagcctgaayactgattctt

SEQ ID NO: 15561 - DNA, 21 bp, Homo sapiens
atgccaacaawttacaaagcc

SEQ ID NO: 15562 - DNA, 21 bp, Homo sapiens
aaaatttcaargaaggacaga

SEQ ID NO: 15563 - DNA, 21 bp, Homo sapiens
ggtggagtacrgttgcaccat

SEQ ID NO: 15564 - DNA, 21 bp, Homo sapiens
attttagattygggggcacat

SEQ ID NO: 15565 - DNA, 21 bp, Homo sapiens
acctgatatgrtttggctgca

SEQ ID NO: 15566 - DNA, 21 bp, Homo sapiens
gaaatttctamgcagcaaagc

SEQ ID NO: 15567 - DNA, 21 bp, Homo sapiens
gttgagcctgygggtacacag

SEQ ID NO: 15568 - DNA, 21 bp, Homo sapiens
gatttcagaaratgtatggaa

SEQ ID NO: 15569 - DNA, 21 bp, Homo sapiens
tttcctcaaaygatccacttg

SEQ ID NO: 15570 - DNA, 20 bp, Homo sapiens
tccaaagccacttctgtctc

SEQ ID NO: 15571 - DNA, 21 bp, Homo sapiens
tccaaagccagcttctgtctc

SEQ ID NO: 15572 - DNA, 20 bp, Homo sapiens
gtggccaagagcacaggctc

SEQ ID NO: 15573 - DNA, 21 bp, Homo sapiens
gtggccaagaagcacaggctc

SEQ ID NO: 15574 - DNA, 20 bp, Homo sapiens
actagcttttcaaagttggt

SEQ ID NO: 15575 - DNA, 21 bp, Homo sapiens
actagctttttcaaagttggt

SEQ ID NO: 15576 - DNA, 21 bp, Homo sapiens
ttgttttatawttttttatac

SEQ ID NO: 15577 - DNA, 21 bp, Homo sapiens
tttcacctatycccaaggcct

SEQ ID NO: 15578 - DNA, 21 bp, Homo sapiens
aggctttgcaraacataagat

SEQ ID NO: 15579 - DNA, 21 bp, Homo sapiens
acatggcttakggaaactctg

SEQ ID NO: 15580 - DNA, 21 bp, Homo sapiens
ttccataagcmatgtctcaat

SEQ ID NO: 15581 - DNA, 21 bp, Homo sapiens
gaatgaggttratacctcatt

SEQ ID NO: 15582 - DNA, 21 bp, Homo sapiens
gactgtaatcycagttacttg

SEQ ID NO: 15583 - DNA, 21 bp, Homo sapiens
ctcctcggccracatggtgaa

SEQ ID NO: 15584 - DNA, 21 bp, Homo sapiens
gctactcggarggctgaggca

SEQ ID NO: 15585 - DNA, 21 bp, Homo sapiens
ctttcagaggyggaggcagtt

SEQ ID NO: 15586 - DNA, 21 bp, Homo sapiens
gcttctatttwaaaaaaataa

SEQ ID NO: 15587 - DNA, 24 bp, Homo sapiens
aataaataaagtaataaaataaag

SEQ ID NO: 15588 - DNA, 20 bp, Homo sapiens
aataaataaataaaataaag

SEQ ID NO: 15589 - DNA, 21 bp, Homo sapiens
ctcagatcacygcaacctccg

SEQ ID NO: 15590 - DNA, 20 bp, Homo sapiens
actgcaacctccgcctcctg

SEQ ID NO: 15591 - DNA, 21 bp, Homo sapiens
actgcaaccttccgcctcctg

SEQ ID NO: 15592 - DNA, 21 bp, Homo sapiens
gcctcctggttcaaacaattc

SEQ ID NO: 15593 - DNA, 20 bp, Homo sapiens
gcctcctggtcaaacaattc

SEQ ID NO: 15594 - DNA, 21 bp, Homo sapiens
ttcaaacaattctcctgcctc

SEQ ID NO: 15595 - DNA, 20 bp, Homo sapiens
ttcaaacaatctcctgcctc

SEQ ID NO: 15596 - DNA, 21 bp, Homo sapiens
aacccgttacrggagggggag

SEQ ID NO: 15597 - DNA, 21 bp, Homo sapiens
gcggaaagagmcccaaagggg

SEQ ID NO: 15598 - DNA, 21 bp, Homo sapiens
cagtcacattwcatgatgact

SEQ ID NO: 15599 - DNA, 21 bp, Homo sapiens
agatcctacarctcccacctc

SEQ ID NO: 15600 - DNA, 21 bp, Homo sapiens
tgggcaaggcrtgtggggagg

SEQ ID NO: 15601 - DNA, 21 bp, Homo sapiens
ttaccactttsggcattctaa

SEQ ID NO: 15602 - DNA, 21 bp, Homo sapiens
cactttgggcrttctaaggat

SEQ ID NO: 15603 - DNA, 21 bp, Homo sapiens
aaggattttakgacttgtatg

SEQ ID NO: 15604 - DNA, 23 bp, Homo sapiens
tcctcctcttattctttcttttt

SEQ ID NO: 15605 - DNA, 20 bp, Homo sapiens
tcctcctcttctttcttttt

SEQ ID NO: 15606 - DNA, 21 bp, Homo sapiens
ctgcagttggygtttgaaacc

SEQ ID NO: 15607 - DNA, 21 bp, Homo sapiens
agcccaggggkcagaggttac

SEQ ID NO: 15608 - DNA, 21 bp, Homo sapiens
aaaagccacgygtggtggcat

SEQ ID NO: 15609 - DNA, 21 bp, Homo sapiens
tgcccaggctkgagtgcagtg

SEQ ID NO: 15610 - DNA, 21 bp, Homo sapiens
gcaatggtgcratctcggctc

SEQ ID NO: 15611 - DNA, 21 bp, Homo sapiens
tccgccatcaygcccagctaa

SEQ ID NO: 15612 - DNA, 21 bp, Homo sapiens
acatagaaatyggcagtgagg

SEQ ID NO: 15613 - DNA, 21 bp, Homo sapiens
gcatttgcctyatttgaacac

SEQ ID NO: 15614 - DNA, 21 bp, Homo sapiens
atttgaacacrgtttgaacac

SEQ ID NO: 15615 - DNA, 21 bp, Homo sapiens
ggagatggctkcttgtaaaca

SEQ ID NO: 15616 - DNA, 21 bp, Homo sapiens
ctattatttcrcataactttc

SEQ ID NO: 15617 - DNA, 21 bp, Homo sapiens
catttctaatmagtgcctctt

SEQ ID NO: 15618 - DNA, 21 bp, Homo sapiens
tgatagtagakaagtcttaat

SEQ ID NO: 15619 - DNA, 21 bp, Homo sapiens
ggatggcaagracagtctttc

SEQ ID NO: 15620 - DNA, 21 bp, Homo sapiens
ttctcagaagwttcattcttt

SEQ ID NO: 15621 - DNA, 21 bp, Homo sapiens
aggtgcatagmactgataact

SEQ ID NO: 15622 - DNA, 21 bp, Homo sapiens
atagcactgayaactgatggg

SEQ ID NO: 15623 - DNA, 21 bp, Homo sapiens
ggagtttattmaaattgtata

SEQ ID NO: 15624 - DNA, 21 bp, Homo sapiens
atttagcatgyggatttctct

SEQ ID NO: 15625 - DNA, 21 bp, Homo sapiens
atccctccccsagcctcctac

SEQ ID NO: 15626 - DNA, 21 bp, Homo sapiens
ctcctaccccytgacaggccc

SEQ ID NO: 15627 - DNA, 21 bp, Homo sapiens
tctttatccartctatctttg

SEQ ID NO: 15628 - DNA, 21 bp, Homo sapiens
ccttgccagcrtctcttgttt

SEQ ID NO: 15629 - DNA, 21 bp, Homo sapiens
cagtttcccarcacaatttat

SEQ ID NO: 15630 - DNA, 21 bp, Homo sapiens
aagtcagatarcgtgatgcct

SEQ ID NO: 15631 - DNA, 21 bp, Homo sapiens
tttttctactrtttggaacag

SEQ ID NO: 15632 - DNA, 21 bp, Homo sapiens
gaatttatccrtttcttctag

SEQ ID NO: 15633 - DNA, 21 bp, Homo sapiens
tttcatgtctytgtctccttc

SEQ ID NO: 15634 - DNA, 21 bp, Homo sapiens
cttctacacaytgctataaat

SEQ ID NO: 15635 - DNA, 21 bp, Homo sapiens
tcaggagcagwttgttcagtt

SEQ ID NO: 15636 - DNA, 21 bp, Homo sapiens
ttttagagtaygtgtgatgta

SEQ ID NO: 15637 - DNA, 21 bp, Homo sapiens
ttctgttgatytggggtggac

SEQ ID NO: 15638 - DNA, 21 bp, Homo sapiens
gtctataggtyccacttggtc

SEQ ID NO: 15639 - DNA, 21 bp, Homo sapiens
aaagtgctggrattacaggca

SEQ ID NO: 15640 - DNA, 21 bp, Homo sapiens
gtcattatgaygttagctggt

SEQ ID NO: 15641 - DNA, 21 bp, Homo sapiens
ctgagacatcygcttttagtc

SEQ ID NO: 15642 - DNA, 21 bp, Homo sapiens
cttcatttcarcgtcggtgta

SEQ ID NO: 15643 - DNA, 21 bp, Homo sapiens
gttccattctycttgtcactt

SEQ ID NO: 15644 - DNA, 21 bp, Homo sapiens
caaccagtccsaatgggatga

SEQ ID NO: 15645 - DNA, 21 bp, Homo sapiens
atgactttaarcagtgatatt

SEQ ID NO: 15646 - DNA, 21 bp, Homo sapiens
ctggctaacayggtgaaaccc

SEQ ID NO: 15647 - DNA, 21 bp, Homo sapiens
tctaaagtacktaattttgag

SEQ ID NO: 15648 - DNA, 21 bp, Homo sapiens
aaaaaaaaaagagagaagtga

SEQ ID NO: 15649 - DNA, 20 bp, Homo sapiens
aaaaaaaaaaagagaagtga

SEQ ID NO: 15650 - DNA, 21 bp, Homo sapiens
ttaagttaggwtacagttcat

SEQ ID NO: 15651 - DNA, 21 bp, Homo sapiens
aaactttagcytcggcatcag

SEQ ID NO: 15652 - DNA, 21 bp, Homo sapiens
acgcctggctratttttgtat

SEQ ID NO: 15653 - DNA, 21 bp, Homo sapiens
gaaggcagagrttgcactgag

SEQ ID NO: 15654 - DNA, 21 bp, Homo sapiens
caaggtatcartcagagggag

SEQ ID NO: 15655 - DNA, 21 bp, Homo sapiens
cagcctcaacctcccaggccc

SEQ ID NO: 15656 - DNA, 20 bp, Homo sapiens
cagcctcaactcccaggccc

SEQ ID NO: 15657 - DNA, 21 bp, Homo sapiens
tggggccgggygctgtggctc

SEQ ID NO: 15658 - DNA, 21 bp, Homo sapiens
gcggaggttgsagtaggccaa

SEQ ID NO: 15659 - DNA, 21 bp, Homo sapiens
tcaaaaaaaawaaaagatctt

SEQ ID NO: 15660 - DNA, 21 bp, Homo sapiens
aaagttctagytgatgcaggt

SEQ ID NO: 15661 - DNA, 21 bp, Homo sapiens
ttgtataggcrttagcaatac

SEQ ID NO: 15662 - DNA, 21 bp, Homo sapiens
gatcagattaraatctacctt

SEQ ID NO: 15663 - DNA, 21 bp, Homo sapiens
accattgcacmccagcctggg

SEQ ID NO: 15664 - DNA, 21 bp, Homo sapiens
ggaggccaagrccagtggatc

SEQ ID NO: 15665 - DNA, 21 bp, Homo sapiens
aaataggtagrctaaacttta

SEQ ID NO: 15666 - DNA, 21 bp, Homo sapiens
gaggggatttkgggttttttt

SEQ ID NO: 15667 - DNA, 21 bp, Homo sapiens
actgcatcctsgaactctagg

SEQ ID NO: 15668 - DNA, 21 bp, Homo sapiens
ttgtagagacrgggtttcaac

SEQ ID NO: 15669 - DNA, 21 bp, Homo sapiens
tttggctgtgyccccacccaa

SEQ ID NO: 15670 - DNA, 21 bp, Homo sapiens
gtgggaggaavctggtgggaa

SEQ ID NO: 15671 - DNA, 21 bp, Homo sapiens
aaaatggactwatacagcatt

SEQ ID NO: 15672 - DNA, 22 bp, Homo sapiens
tccttaacttcttttacctgag

SEQ ID NO: 15673 - DNA, 20 bp, Homo sapiens
tccttaactttttacctgag

SEQ ID NO: 15674 - DNA, 21 bp, Homo sapiens
taagattaagktgctggcagg

SEQ ID NO: 15675 - DNA, 21 bp, Homo sapiens
aggacctgctsttttcctcct

SEQ ID NO: 15676 - DNA, 21 bp, Homo sapiens
cagaatgaaargaagatggcc

SEQ ID NO: 15677 - DNA, 21 bp, Homo sapiens
gtcataaccaygaacacacaa

SEQ ID NO: 15678 - DNA, 21 bp, Homo sapiens
ttgaatgtatkcacctcgctc

SEQ ID NO: 15679 - DNA, 21 bp, Homo sapiens
ctggccagggmaatcaggcaa

SEQ ID NO: 15680 - DNA, 21 bp, Homo sapiens
aagtcaacttstctctgattg

SEQ ID NO: 15681 - DNA, 21 bp, Homo sapiens
aaaaaagagcstgaatagcca

SEQ ID NO: 15682 - DNA, 21 bp, Homo sapiens
aaacagcatgrtactggtacc

SEQ ID NO: 15683 - DNA, 21 bp, Homo sapiens
taactcaagayggattaaaga

SEQ ID NO: 15684 - DNA, 21 bp, Homo sapiens
aacaccaaaarcaatggcgac

SEQ ID NO: 15685 - DNA, 21 bp, Homo sapiens
tcaaaattatygtaggccagg

SEQ ID NO: 15686 - DNA, 21 bp, Homo sapiens
aacacatacaratagaaaata

SEQ ID NO: 15687 - DNA, 21 bp, Homo sapiens
tgtttttttgrgatgaggtct

SEQ ID NO: 15688 - DNA, 21 bp, Homo sapiens
agccaccgtgmcttgcccatc

SEQ ID NO: 15689 - DNA, 21 bp, Homo sapiens
gtactcaagaytttcctttat

SEQ ID NO: 15690 - DNA, 21 bp, Homo sapiens
ctaggcttacwcatatacctc

SEQ ID NO: 15691 - DNA, 21 bp, Homo sapiens
tgccgtgagcygagatcgcac

SEQ ID NO: 15692 - DNA, 21 bp, Homo sapiens
gaagattaagstgttggcagg

SEQ ID NO: 15693 - DNA, 21 bp, Homo sapiens
ggtcttccccygtttgtgtgt

SEQ ID NO: 15694 - DNA, 21 bp, Homo sapiens
ttagacatatratccacctga

SEQ ID NO: 15695 - DNA, 21 bp, Homo sapiens
atgtatttttygaaacatata

SEQ ID NO: 15696 - DNA, 21 bp, Homo sapiens
taagttattcygcagaaaaat

SEQ ID NO: 15697 - DNA, 21 bp, Homo sapiens
atggagtttckctcttgtcac

SEQ ID NO: 15698 - DNA, 21 bp, Homo sapiens
ctccgcctccygggtttgagc

SEQ ID NO: 15699 - DNA, 21 bp, Homo sapiens
ccgcctcccgrgtttgagcta

SEQ ID NO: 15700 - DNA, 21 bp, Homo sapiens
tcctgcctcascctcccgagt

SEQ ID NO: 15701 - DNA, 21 bp, Homo sapiens
ccgccactggyttctttgctc

SEQ ID NO: 15702 - DNA, 21 bp, Homo sapiens
aattgtaccaytgaaaacggt

SEQ ID NO: 15703 - DNA, 21 bp, Homo sapiens
tttaagaaaargaaggggaaa

SEQ ID NO: 15704 - DNA, 21 bp, Homo sapiens
aagggtatttytgccacaatg

SEQ ID NO: 15705 - DNA, 21 bp, Homo sapiens
atgagcacccrctggcagtcc

SEQ ID NO: 15706 - DNA, 21 bp, Homo sapiens
tgggacaagawtagccggtaa

SEQ ID NO: 15707 - DNA, 21 bp, Homo sapiens
tccagcctggrcaacaagaaa

SEQ ID NO: 15708 - DNA, 20 bp, Homo sapiens
tgttttagacggggggaaaa

SEQ ID NO: 15709 - DNA, 21 bp, Homo sapiens
tgttttagacaggggggaaaa

SEQ ID NO: 15710 - DNA, 21 bp, Homo sapiens
gctgagacatygtggcaggga

SEQ ID NO: 15711 - DNA, 20 bp, Homo sapiens
tgggcaaacattcattcagt

SEQ ID NO: 15712 - DNA, 24 bp, Homo sapiens
tgggcaaacactcattcattcagt

SEQ ID NO: 15713 - DNA, 21 bp, Homo sapiens
gaacgggacawatttgagaat

SEQ ID NO: 15714 - DNA, 21 bp, Homo sapiens
aacgggacatrtttgagaatc

SEQ ID NO: 15715 - DNA, 21 bp, Homo sapiens
taggttggatycctaatccag

SEQ ID NO: 15716 - DNA, 21 bp, Homo sapiens
tgggagtattrttattatttt

SEQ ID NO: 15717 - DNA, 21 bp, Homo sapiens
cgggttcaagygattctcctg

SEQ ID NO: 15718 - DNA, 21 bp, Homo sapiens
ttagtagagayggagttttgc

SEQ ID NO: 15719 - DNA, 21 bp, Homo sapiens
gtgtcttttayaaggatgtca

SEQ ID NO: 15720 - DNA, 31 bp, Homo sapiens
atggccaagcttgagctgcagactttccaag

SEQ ID NO: 15721 - DNA, 36 bp, Homo sapiens
atggccaagcttgagctgcagcaggcactttccaag

SEQ ID NO: 15722 - DNA, 20 bp, Homo sapiens
atggccaagcactttccaag

SEQ ID NO: 15723 - DNA, 21 bp, Homo sapiens
ggctcaaatgrtctgcccacc

SEQ ID NO: 15724 - DNA, 21 bp, Homo sapiens
ggattacagaygtgagccact

SEQ ID NO: 15725 - DNA, 21 bp, Homo sapiens
tggtgaaaccctgtctctact

SEQ ID NO: 15726 - DNA, 20 bp, Homo sapiens
tggtgaaacctgtctctact

SEQ ID NO: 15727 - DNA, 21 bp, Homo sapiens
ggggtgatggygcgtgcctgt

SEQ ID NO: 15728 - DNA, 21 bp, Homo sapiens
caaaaagtatsggaaaaccac

SEQ ID NO: 15729 - DNA, 21 bp, Homo sapiens
gaggccgaggygggtggatca

SEQ ID NO: 15730 - DNA, 21 bp, Homo sapiens
tttcttttctwcctttcaatg

SEQ ID NO: 15731 - DNA, 21 bp, Homo sapiens
ccaccttggcytcccaaagtg

SEQ ID NO: 15732 - DNA, 21 bp, Homo sapiens
gctgggattayaggtgtgagc

SEQ ID NO: 15733 - DNA, 21 bp, Homo sapiens
tcatttctttstgttgggacc

SEQ ID NO: 15734 - DNA, 20 bp, Homo sapiens
tggtttggctggcaaatatg

SEQ ID NO: 15735 - DNA, 21 bp, Homo sapiens
tggtttggcttggcaaatatg

SEQ ID NO: 15736 - DNA, 21 bp, Homo sapiens
tgatatctgcrgctgaactgg

SEQ ID NO: 15737 - DNA, 21 bp, Homo sapiens
cttccagagggcaaagtcacc

SEQ ID NO: 15738 - DNA, 20 bp, Homo sapiens
cttccagaggcaaagtcacc

SEQ ID NO: 15739 - DNA, 21 bp, Homo sapiens
cctgtagtcccagctacctgg

SEQ ID NO: 15740 - DNA, 20 bp, Homo sapiens
cctgtagtccagctacctgg

SEQ ID NO: 15741 - DNA, 21 bp, Homo sapiens
caataaatttmtacggcttat

SEQ ID NO: 15742 - DNA, 21 bp, Homo sapiens
catagatacartgtaacatgc

SEQ ID NO: 15743 - DNA, 21 bp, Homo sapiens
tataaccactkaaaaatggtt

SEQ ID NO: 15744 - DNA, 21 bp, Homo sapiens
tccctcttttcattgcttgag

SEQ ID NO: 15745 - DNA, 32 bp, Homo sapiens
tccctcttttccttcttcttttattgcttgag

SEQ ID NO: 15746 - DNA, 20 bp, Homo sapiens
tccctcttttattgcttgag

SEQ ID NO: 15747 - DNA, 21 bp, Homo sapiens
tattacatttmagtatttaat

SEQ ID NO: 15748 - DNA, 21 bp, Homo sapiens
tagatttgtcrtaaactagtc

SEQ ID NO: 15749 - DNA, 21 bp, Homo sapiens
accctattgtrcagaggaggt

SEQ ID NO: 15750 - DNA, 21 bp, Homo sapiens
accaccctccwctgtcgctca

SEQ ID NO: 15751 - DNA, 21 bp, Homo sapiens
tgtcagagctrggggtgagcc

SEQ ID NO: 15752 - DNA, 21 bp, Homo sapiens
ctgacccccaraggagcttct

SEQ ID NO: 15753 - DNA, 21 bp, Homo sapiens
tttaaaaaaamctaaatgtcc

SEQ ID NO: 15754 - DNA, 21 bp, Homo sapiens
aaaactaaatrtccaaaattc

SEQ ID NO: 15755 - DNA, 21 bp, Homo sapiens
tataatactascatatagaga

SEQ ID NO: 15756 - DNA, 21 bp, Homo sapiens
tggccactgtrctccagggca

SEQ ID NO: 15757 - DNA, 21 bp, Homo sapiens
tgacttgggcwtgtttgtgag

SEQ ID NO: 15758 - DNA, 21 bp, Homo sapiens
ttaaggtcacrtcttgattat

SEQ ID NO: 15759 - DNA, 21 bp, Homo sapiens
ctcaaaacttyatgaatatca

SEQ ID NO: 15760 - DNA, 21 bp, Homo sapiens
aaacccacgakatagggacta

SEQ ID NO: 15761 - DNA, 21 bp, Homo sapiens
agggctgagaygagaacccca

SEQ ID NO: 15762 - DNA, 21 bp, Homo sapiens
ccatggaactkctgggaggtc

SEQ ID NO: 15763 - DNA, 21 bp, Homo sapiens
agttctttaakctgtaatgag

SEQ ID NO: 15764 - DNA, 21 bp, Homo sapiens
tgggcaaaccwgtgactcgtt

SEQ ID NO: 15765 - DNA, 21 bp, Homo sapiens
gccacaagcayggccaatggg

SEQ ID NO: 15766 - DNA, 20 bp, Homo sapiens
cagagaaggcgcctcctccc

SEQ ID NO: 15767 - DNA, 32 bp, Homo sapiens
cagagaaggctggatcacctgcgcctcctccc

SEQ ID NO: 15768 - DNA, 21 bp, Homo sapiens
ccaggagactygtgctacgtc

SEQ ID NO: 15769 - DNA, 21 bp, Homo sapiens
ggaaatgaacwgttcttggta

SEQ ID NO: 15770 - DNA, 21 bp, Homo sapiens
gagttattctrtgtaaattac

SEQ ID NO: 15771 - DNA, 21 bp, Homo sapiens
gaccacacacrgtgtgattcc

SEQ ID NO: 15772 - DNA, 21 bp, Homo sapiens
ctcaataaagstgttaggcaa

SEQ ID NO: 15773 - DNA, 21 bp, Homo sapiens
ggaggaagaggagggacaaat

SEQ ID NO: 15774 - DNA, 20 bp, Homo sapiens
ggaggaagagagggacaaat

SEQ ID NO: 15775 - DNA, 21 bp, Homo sapiens
ctaaacatacaaaaaaattag

SEQ ID NO: 15776 - DNA, 20 bp, Homo sapiens
ctaaacatacaaaaaattag

SEQ ID NO: 15777 - DNA, 20 bp, Homo sapiens
acaaaaaaattagccgggcg

SEQ ID NO: 15778 - DNA, 21 bp, Homo sapiens
acaaaaaaatatagccgggcg

SEQ ID NO: 15779 - DNA, 21 bp, Homo sapiens
ttagccgggcrtggtggcaca

SEQ ID NO: 15780 - DNA, 21 bp, Homo sapiens
ctacttgggargctgaggcag

SEQ ID NO: 15781 - DNA, 21 bp, Homo sapiens
ccactgcactsaagcctgggc

SEQ ID NO: 15782 - DNA, 20 bp, Homo sapiens
cccagctactcaggaggctg

SEQ ID NO: 15783 - DNA, 21 bp, Homo sapiens
cccagctacttcaggaggctg

SEQ ID NO: 15784 - DNA, 21 bp, Homo sapiens
tctgcatgttwtttgtatatc

SEQ ID NO: 15785 - DNA, 21 bp, Homo sapiens
atagagatagwgatagaaaga

SEQ ID NO: 15786 - DNA, 21 bp, Homo sapiens
ggcatgatctyggctcactgc

SEQ ID NO: 15787 - DNA, 21 bp, Homo sapiens
ctgcaaactcygcctcctgag

SEQ ID NO: 15788 - DNA, 21 bp, Homo sapiens
cgtgagccacygtgcctggcc

SEQ ID NO: 15789 - DNA, 21 bp, Homo sapiens
cccaggttcamgtgattcttc

SEQ ID NO: 15790 - DNA, 21 bp, Homo sapiens
ccaggttcaartgattcttct

SEQ ID NO: 15791 - DNA, 21 bp, Homo sapiens
tgctgtcccacttcagcccgc

SEQ ID NO: 15792 - DNA, 20 bp, Homo sapiens
tgctgtcccattcagcccgc

SEQ ID NO: 15793 - DNA, 21 bp, Homo sapiens
ctcgctgcccmctccactctc

SEQ ID NO: 15794 - DNA, 21 bp, Homo sapiens
acatgtagtcycctttgttgt

SEQ ID NO: 15795 - DNA, 22 bp, Homo sapiens
tgtgttcatgagtgtgcatgtg

SEQ ID NO: 15796 - DNA, 20 bp, Homo sapiens
tgtgttcatgtgtgcatgtg

SEQ ID NO: 15797 - DNA, 21 bp, Homo sapiens
gtgttcatgagtgtgcatgtg

SEQ ID NO: 15798 - DNA, 20 bp, Homo sapiens
gtgttcatgatgtgcatgtg

SEQ ID NO: 15799 - DNA, 21 bp, Homo sapiens
tgtgtgtgcaygcatgtgcat

SEQ ID NO: 15800 - DNA, 21 bp, Homo sapiens
gagcatctgcwctgtaagtgt

SEQ ID NO: 15801 - DNA, 21 bp, Homo sapiens
tcatggcactyggacataaat

SEQ ID NO: 15802 - DNA, 21 bp, Homo sapiens
catggcactcrgacataaatt

SEQ ID NO: 15803 - DNA, 21 bp, Homo sapiens
agtgttggacygcacagtcta

SEQ ID NO: 15804 - DNA, 21 bp, Homo sapiens
ggaggctgggwggctaagcca

SEQ ID NO: 15805 - DNA, 20 bp, Homo sapiens
caagccccccagctgaggcg

SEQ ID NO: 15806 - DNA, 21 bp, Homo sapiens
caagcccccccagctgaggcg

SEQ ID NO: 15807 - DNA, 21 bp, Homo sapiens
gccaggatgggaactgccagg

SEQ ID NO: 15808 - DNA, 20 bp, Homo sapiens
gccaggatggaactgccagg

SEQ ID NO: 15809 - DNA, 21 bp, Homo sapiens
agcggcagcaycccaggcgct

SEQ ID NO: 15810 - DNA, 21 bp, Homo sapiens
ggttctgtaaytataagaagc

SEQ ID NO: 15811 - DNA, 21 bp, Homo sapiens
aaacccggccrcactgctgct

SEQ ID NO: 15812 - DNA, 125 bp, Homo sapiens
acagagcaaaactctgtcacaaaataaaataaaataaaataaaataaaataaaataaaataaaataaaacaaaaatcagctcttgattttccatagcctcctaactgggctcttcatcttcaatc

SEQ ID NO: 15813 - DNA, 121 bp, Homo sapiens
tgacagaatgagactgtctcaaaaaaaaaaaaaaaaaaaaaagcctaacagaaacacactgtaataggctagtttatgaaaagatacatctagtcctaaaactgttttcaatggaatcatt

SEQ ID NO: 15814 - DNA, 121 bp, Homo sapiens
tatagagaacttcatatttcttttttttttattcttccattacaaatttattatcttttcagacaagttgagacatactaatttaaaataaattcccttttcagtgaaaagttgataagtt

SEQ ID NO: 15815 - DNA, 125 bp, Homo sapiens
agagggaaactctgtctcaaaaaataaataaaataaaataaataaaataaaataaaataaaataaaataaaataaaataaaataaaataagccttctgtggtgttgttgaagtatgctttttttt

SEQ ID NO: 15816 - DNA, 121 bp, Homo sapiens
gtggtgttgttgaagtatgcttttttttttctgtcactaattcttaaaaatttcacaaaccattttgtaaagcatttattggacccttactgtttgccaagcactgggccaagagctttat

SEQ ID NO: 15817 - DNA, 121 bp, Homo sapiens
ttgaacattttcatcatgccaaaaaaaaaatcacatccatgagcagtcacttcctatttcccctcaatcttcccagtctatggcagccactatttgctttccgtttctgttgatttgccta

SEQ ID NO: 15818 - DNA, 121 bp, Homo sapiens
ttcaaagggtaatgatagggaaaaaaaaaaaccaaaaaaaaaacaaaaccagtgctaataaccatctccctactgtagtcccactatcttcagcaatttcatgtaaatatattttttattt

SEQ ID NO: 15819 - DNA, 121 bp, Homo sapiens
gctctatattttgtcagcctaaaaaaagacactagggaagattatcttcaaatttgttgggtttacttgagaatataaataaggagtataatacagaatgcatgacatggcaagccagcag

SEQ ID NO: 15820 - DNA, 125 bp, Homo sapiens
gagtgagaccctgtcattaaaaaagaaaagaaaagaaaagaaaagaaaagaaatacctgaggctcggtaatttatgaagaaaagagttttatttcagctcacagttctgcaggctgtccaggaag

SEQ ID NO: 15821 - DNA, 121 bp, Homo sapiens
ctggaataattaattcaaactttttttcttttttttttttttgagacagagtctcactctgttgcccaggctggagtgaatggcgtgaccttggctcactgcaggctctgcctcccgggtt

SEQ ID NO: 15822 - DNA, 121 bp, Homo sapiens
aaatacaatttatgatcatcttttttttttgttttaagtttagagacagaagaagagcaacagtatctcacctcaagctatattaacatctccactgattcattacaaggtggcaagaagt

SEQ ID NO: 15823 - DNA, 121 bp, Homo sapiens
cctgtctctactaaaagtacaaaaaaaaaattagccaggcatggtggcgggcacctgtagtcccagctactcaggaggctgaggcaggagaattgcttgaatctgggaggcagaggttgca

SEQ ID NO: 15824 - DNA, 121 bp, Homo sapiens
acacagcaaaactcttgtctaaaaaaaaaaaaaaaaatccatatatgtgtttttacaaatatttattggaaacttcttattttcaagcattgttctaaaggctagagtgaataagatagac

SEQ ID NO: 15825 - DNA, 121 bp, Homo sapiens
tacaatctactagggaaggcaaaaaaaaaaaaaacaaaaaaacactatgatcatgataaagtttgttgagtcttacgttgtgaaaagtacagcatgctaaattcttatactctatacacta

SEQ ID NO: 15826 - DNA, 121 bp, Homo sapiens
ctctagaatctcaatactgattttttttttttttccagggttggggttgggcagagtcttgctctgttacccaggctggagtgcagtggcatgatctcagctcgctgcaacctctacttct

SEQ ID NO: 15827 - DNA, 124 bp, Homo sapiens
agatctgaattgaacatccatctttctttctttctttctttctttctttctttctttctttctttctttctttttctttctttctttctctttttttttctttctttctttcttgctctttctg

SEQ ID NO: 15828 - DNA, 121 bp, Homo sapiens
acaggactattagagttcagtttttttttttttaatggggaatgggctgaatagaattttccttaacagcagttttcttctatgtaacaaattagcaaataagaaaatgtccataattgtt

SEQ ID NO: 15829 - DNA, 121 bp, Homo sapiens
aagttttaaacagccaggtctttttttttttttttttttttctagtgataccttctgcagccgtcatttccagggctgagactataaatgctacagtgcccaagaccataatttattggga

SEQ ID NO: 15830 - DNA, 121 bp, Homo sapiens
agtgactctgtctccagaggaaaaaaaaaaaaaggataccaaatcctcttacttcatgcaaataggagtatgtaatagactagaaaaagtgtttagaaaatagaaaggaattatattatca

SEQ ID NO: 15831 - DNA, 121 bp, Homo sapiens
tactttctagtcatgcaatcttttttttttttttccttttgagacagggtcttgctctactgcccaggctggagcgcagtggcgcaatctcagctcactgcagccttgacctcctggactc

SEQ ID NO: 15832 - DNA, 121 bp, Homo sapiens
atgaggttgatacctcattcttttttttttttaatctcaatcgttgtaactttctctttcatgagtatctgataactgctttcacctagttgttgcataaatgcatttctagacatattga

SEQ ID NO: 15833 - DNA, 122 bp, Homo sapiens
tttttctctgacacatacacatatatatatatatacatacatatacatatatacatatatacacatatatgcatatgtgtgtgtgtgtgtgtgtgtgtgtgtgtgtgtatatatatatatat

SEQ ID NO: 15834 - DNA, 122 bp, Homo sapiens
atatacacatatatgcatattggtgtgtgtgtgtgtgtgtgtgtgtgtgtgtatatatatatatatgtatgtattattgggccttgtagaatctgcaataacctgcaatgaggaccaactta

SEQ ID NO: 15835 - DNA, 122 bp, Homo sapiens
tgtgtgtgtgtgtgtgtgtgtatatatatatatatgtatgtattattgggccttgtagaatctgcaataacctgcaatgaggaccaacttacagcttagcttataggtatttttttctaaaa

SEQ ID NO: 15836 - DNA, 121 bp, Homo sapiens
cagagtgggaccctatctagaaaaaaaataaaataaaaaatatatatatacacacacacacatataaataaataaatatatatacacacataaataaatatatatacacatatatataata

SEQ ID NO: 15837 - DNA, 121 bp, Homo sapiens
tctctttctttctttctttcttttttttttttttttttttttttttttgacagtcttgctctcttgctcttttgcccagcctgaggtacagtggtgtgatctcggctcactgcaacctcca

SEQ ID NO: 15838 - DNA, 121 bp, Homo sapiens
cattaagaatgcttgggcactttttttttttttgatacagtctcgctctgtcacccaggctagagtgtagtgcaccatctcagatcactgcaacctccgcctcctggttcaaacaattctc

SEQ ID NO: 15839 - DNA, 121 bp, Homo sapiens
acatccaccacacctggctatttttttttgcatttttagtagagacagggtttcgtcatgttggccaggctggtctcgaactcctgacctcaaatgatccccctgccttggcctcccagag

SEQ ID NO: 15840 - DNA, 121 bp, Homo sapiens
ccagagaactcatattactctttttttttttttgacagttttccagaggaaggcaagtatgagcaagatattaaacaacattttgctttcctctcacaaaacagtattggttgttgcacta

SEQ ID NO: 15841 - DNA, 124 bp, Homo sapiens
tattactacagaacaaagatctttctttctttctttctttctttctttctttctttctttctttctttctttctttctttctttctttctttctttcttcctttctttcttttctttctttctc

SEQ ID NO: 15842 - DNA, 124 bp, Homo sapiens
ctttctttctgtctttctttttccttccttccttccttccttccttccttccttccttccttccttcctcccttcttttttagacagggtctctctctgtcacccaggctggagtgcagtggtg

SEQ ID NO: 15843 - DNA, 121 bp, Homo sapiens
cagctaattttttttcttcctttttttttttttttgtagagacagggtttcaccatgtttgccaagttggtcttgaactcctggactcaagaactctgcccaccttggcctcccaaagtgc

SEQ ID NO: 15844 - DNA, 121 bp, Homo sapiens
ctgtctctactaaaaattccaaaaaaaaaaaaaaaaaaaaaaaagccacgcgtggtggcatgctcctgtaatcccagctacttgggaggttgagacaggagaattgctagaacccaggagg

SEQ ID NO: 15845 - DNA, 121 bp, Homo sapiens
tacagtaagatatcatgaggttttttttttttttagcaaattaggcaatgcactgatgacagaactgatataaaaaacagtttccagtcataaaggctgtgtgtgtgtgtgtgtgtgtgtg

SEQ ID NO: 15846 - DNA, 122 bp, Homo sapiens
ttccagtcataaaggctgtgtgtgtgtgtgtgtgtgtgtgtgtgtgtgtgtgtgtgtgtgagattctgtgtttgctaatgcttttgtatgttaaaatacttgcaaataccataaagcactaa

SEQ ID NO: 15847 - DNA, 121 bp, Homo sapiens
ttaatgtagtatttttactcttttttttttttttttttgagatggagtcttgttctgttgcccaggctggagtgcagtggtgtgatctcagctcactgcagcctctgcctcctgggttcaa

SEQ ID NO: 15848 - DNA, 121 bp, Homo sapiens
tgcctgcacccagagcagccttttttcttttttctttttttttttttgtgaaatggagtctccctctgtcacccaggccggagtgctatggcacgatctagactcactgcagcctccacct

SEQ ID NO: 15849 - DNA, 123 bp, Homo sapiens
gatttacccaattaaataaaaagaagaagaaaagacacatactcgaagactattgcttttattccacccttcaagcccattaaagttattggtttactttagtcatctctaaacaagggaaga

SEQ ID NO: 15850 - DNA, 121 bp, Homo sapiens
gagcaagaccctgtctcaggaaaaaaaaaaaaaagaggaaaaagaagaaaaagaaaaagaaacatgaagaaaggtaagggcactctgaattatcaatcaattgcaagccaagtgcttaggt

SEQ ID NO: 15851 - DNA, 121 bp, Homo sapiens
gtcagagcaaatgtatagacaaaaaaaaaagtgacacatagaaattggcagtgaggtacagaaacagctggataggttatggattggcatttgccttatttgaacacagtttgaacactta

SEQ ID NO: 15852 - DNA, 121 bp, Homo sapiens
atttagcatgcggatttctctttttttttcttatactgtaagttctgggatacatgtgcagaacatgcaggttcgttacataggtatacatgtgccatggtggtttgctgcacccatcaac

SEQ ID NO: 15853 - DNA, 121 bp, Homo sapiens
actaggattgcaacccctgcttttttttttctttccattttcttggtaaatcttccttcatccctttattttgtgtgtgtttttgcacatgagatgggtctcctgaatacagcactactga

SEQ ID NO: 15854 - DNA, 121 bp, Homo sapiens
ggggcatttagcccatttactttttttttttttttgagatggagtttcacttttgttgcccagactggagtgcaatggcacgatcttggctccctgcaacctctgcctcccaggtgcaagg

SEQ ID NO: 15855 - DNA, 121 bp, Homo sapiens
acagagcgagactctgtctcaaaaaaaaaaaaaaaggaaaagacataaaggccttttaaatatacctatagcttggatatccacttttaattaagctgactcttaactatagtgctcttta

SEQ ID NO: 15856 - DNA, 121 bp, Homo sapiens
gtcagaacaaatttatagacaaaaaaaaaaaaaaagagagaagtgacatacagaaattggcagtgatgtacagaaacagctggttggttacaggttggcatttgtcttatttgaacacagt

SEQ ID NO: 15857 - DNA, 121 bp, Homo sapiens
agtttgatttctttaattaattttttttttgagtcagggtctcactctgttgcccagagtgagtgcagtggcatggtcacagctcactacagccttgacctcccaggctcaagcgatcttt

SEQ ID NO: 15858 - DNA, 121 bp, Homo sapiens
aagagcaaaactctgtctggaaaaaaaaaaaaaaaaaaaaaaaaagaataactaatacttgcttgcaaagggagaggcaagtttaattttcattttatcacttaaaattctcttgagtaga

SEQ ID NO: 15859 - DNA, 121 bp, Homo sapiens
agcaggctattttgttttactttttttttttttgataaaaatctaaaagcaattttatggtcattaagtatccttgaaatgaggttgactgtatatcccagtttgccctggtttctgtcca

SEQ ID NO: 15860 - DNA, 121 bp, Homo sapiens
taattcatcagaaatttatctttttttttttttttgcactgacaatcctctttattttactttttatcatttactaaggccattttgctccaaaagggtattactattcatactgtaaaaa

SEQ ID NO: 15861 - DNA, 121 bp, Homo sapiens
ctgatacttttacatagtgtaaaaaaaaaaaaaagttatcccccagataaactctattctgtttatcctaaaatatgtatatattttttgtactttgcatattctgaaaggaatatatttt

SEQ ID NO: 15862 - DNA, 121 bp, Homo sapiens
tttaattggaatttctttccttttttttttttttttttttaacaggtcacccaggctggtgcacaatcacagctcaccacagcctcaacctcccaggcccaagcaattcccctatcccagc

SEQ ID NO: 15863 - DNA, 121 bp, Homo sapiens
acagagcgagactccatcgcaaaaaaaaaaaaaagcaatctgttgtagaatccttaaatgtaaaacggatgaaagcaaatctcctgttgaaacagaccttggaggtcatacctgtgccctc

SEQ ID NO: 15864 - DNA, 121 bp, Homo sapiens
acataccaagaccctgtctcaaaaaaaaaaaattagattttggtaagtattaccaattatttctctaaaaagagtttgccaatattattagtacgtaaaatgtttgccaacctgatgggta

SEQ ID NO: 15865 - DNA, 121 bp, Homo sapiens
acagagcgagactccatctcaaaaaaaaaaaaagatcttaattgaggtcaggtgctttggctcatgcctgtaatcccaaaactttgggaggctgaggtgggaggattgcttgagcttggga

SEQ ID NO: 15866 - DNA, 124 bp, Homo sapiens
ctgtctcaaaaataaataaaaaataaaaagaatccacctttctcagaccctggctatgtggtttccagcaaacccttaaccaggaggattcagtttctttttccttaaaaaagatcctattaat

SEQ ID NO: 15867 - DNA, 121 bp, Homo sapiens
cacaaaacatgcctggctaatttttttgttttttgtagagatgttatctcgctatgttgcccaggctggtcttgacctcctagcttcaagcaatcctccttccttgatctcccaaagtgct

SEQ ID NO: 15868 - DNA, 121 bp, Homo sapiens
gagaatattaatcaaatgtcttttttttttgagatagggtctcactctgctgcccaggctggagagcagtggcatgatcttggctcactgcagccttgacttcctccacttcccaagctcg

SEQ ID NO: 15869 - DNA, 121 bp, Homo sapiens
agtgggtctttgtcatttgctttttttttttttcctgagatggagtctcgctgtcgcccaggctggagtgcagtggcgcgatctaggctcactgcaggctccgtcccctgggttcacgcca

SEQ ID NO: 15870 - DNA, 124 bp, Homo sapiens
tggaacaggcaaggcagctttttctttctttctttctttctttctttctttctttctttctttctttctttctttctctctttctctctttctctctttctctctttctctttctctctttctt

SEQ ID NO: 15871 - DNA, 121 bp, Homo sapiens
gcagagcgagaccctgtctcaaaaaaaaaagttaattaattaattaaataaaataaaaaataaaatgcagattctgattcagctgttctggaataggcccagagaggctgcgtttccaaca

SEQ ID NO: 15872 - DNA, 124 bp, Homo sapiens
cttcaagcccaggagtgcattttatttatttatttatttatttatttatttattttgagatggagtttcgctcttgtcacccaggctggagtgcaatggcccaatcttggctcattacaacctc

SEQ ID NO: 15873 - DNA, 121 bp, Homo sapiens
aacaagaaagaaactctgtcaaaaaaaaaaaaaaaacaaaagcaccaagaaggctttctgatttattctcatgccatccctgttggaaggtcattttccgttacaagggtcagtgtgctcc

SEQ ID NO: 15874 - DNA, 121 bp, Homo sapiens
ttccccccacccaccccctcaaaaaaaaaaactcgtatgttgaagtgctcactcccaggacctcagaatatgaccttacttggaaatagggtcgttgtagatgtaattagctaagatgagg

SEQ ID NO: 15875 - DNA, 121 bp, Homo sapiens
tagcaagaccttgtctctacaaaaaaaaaaaaaaattacaattaattagccagatgtggtggtaagtgcctgtactcttagctatttggaaggaggttgaggtgggaaattcacttgaggc

SEQ ID NO: 15876 - DNA, 121 bp, Homo sapiens
caacagagtgagaccgtggcaaaaaaaaaaaaaaaaaaaattgcagaataaggactgcttagggagtccagagaggcttcctagaggagaaaacccttgagctgaggtcagacaatgagag

SEQ ID NO: 15877 - DNA, 121 bp, Homo sapiens
ggcaaaagcccatctctactaaaaaaaaaaaaaaaaaaaaaaaattagctgggcatggtgccacacgcctatagtcccagctactagggaagctgaggcaggagaattgcttgaacccagg

SEQ ID NO: 15878 - DNA, 124 bp, Homo sapiens
cagagcaagactctgtctcaaaacaaacaaacaaacaaacaaacaaaaaaacagtgtggatcagccgtgagggctgtgaggcaggctgagtctccaagttctccatcacagaccagcacaggga

SEQ ID NO: 15879 - DNA, 122 bp, Homo sapiens
ctctaaggaaaggcacgtgtacacacacacacaaacacacacacacacacacacacacacacacacacaaaaggcagtggaattataccatgtgcaagtggtgctggaatgacccaagaaag

SEQ ID NO: 15880 - DNA, 121 bp, Homo sapiens
cacatgttttgcatttgttctttttttttttttttttttttttttttgagacagttttgctcttgttgcccaggctggagtgcaatgacatgatctcggctcactgcaacctccgcctccc

SEQ ID NO: 15881 - DNA, 121 bp, Homo sapiens
aagcaacatggctatttcgcaaaaaaaaaaaaaaaaaaaagcataaaattaacatacaattctgctgtgccacttctgggtatacctaaaagtagtgaaagcagagacttgaacaaatatt

SEQ ID NO: 15882 - DNA, 121 bp, Homo sapiens
tacgtatattttaccacaataaaaaaaatttaagtgatatgttaaaatgctccactaaagagtgaaattgtcaatttatccttttagttctctcaatcttcattttatgtatttttgtttc

SEQ ID NO: 15883 - DNA, 121 bp, Homo sapiens
taagaaaacactcaagaaggttttcttttttttttaatggagctgaagcacagagcctcagatgggcacaaaatgatgaacacatttattttgattttttacttataatactaccatatag

SEQ ID NO: 15884 - DNA, 121 bp, Homo sapiens
caggatcggaggatacacgctttttttttttttttttttgacgcagtctcactctgttgcccaggctggagtgcagtggcgtggtctctgctcactgcaagctccgcctcctgggttcacg

SEQ ID NO: 15885 - DNA, 121 bp, Homo sapiens
ccaccaccaagcccggctaattttttttttgtatttttagtagagacagggtttcactgtgttagccaggatggtctcgatctcctgacctcgtgatccgcctgcctcggcctcccaaagt

SEQ ID NO: 15886 - DNA, 123 bp, Homo sapiens
ggacacagagggaggaagaagcggcggcggcggcggcggcggcggcggctcctctttgcagagggggaaactcttgggctgagagcaggaataatgcggtaggcaaggcgggctgctggctcc

SEQ ID NO: 15887 - DNA, 121 bp, Homo sapiens
ttagcggggagggggttatcaaaaaaaaaaaaatgtgactcaagacttccagagcctcaaatgagaaaatgtctttattaaatgtagaaagtgatccatacttcacctttgaaggattggt
